United States Patent Application Publication US 2026/0058010 A1 - sequence listing, part 3

SEQ ID NO: 25 - DNA, 568657 bp, Homo sapiens
  source 1..568657: mol_type = genomic DNA
aattcactttaaatataagggacaaagacaaaataatgaaaaccaagggtttgcatattttgtgattattttataggaaacagctaattattaaactaaggaaaactaaaattaaatatttatttttctacttaagaagtgtcttggccgggcacagtggctcacgcctgtaatcccagcactttgggaagccgaggcaggtggatcacctgaagtcagcagttcgagaccagcctggacaacatggtgaaaccctatctgtactaaaaatacaaaaattggccaggtgtggtggcacatgcctgtaatcccagctacttgggaggctgaggcaggagaatcacttgaacccgggagggggaagttgcagtgagccaagattgtgccactgcacttcagcctgggggacagagcaagacggtgtccaaaaaaaacagtgaattctcctctctgctaggggagcattatattttttgtaattttagaattacatcatttctggtcacagctgtctaagcgggctatgattttgcttcataaagtcttattgattttgattattcttaccttaaagattacatgtgttaccatttatcctaatgaaattaagataaaacctgattttttttaccagcctttagattcagtattagacacagaacattttataaggatccttgataaggctcttacttccttgtcttatcacagaagtagaattagaagctctgtaacaaatatccaacccctccaccattttgataatctgtttttggactgggtatatagtaggtgatcaataaatgattattgaatgaatgaatgtaagcctgaatggatggttctgacttcctgtctgcttatctgcctatccgtccaggtctgtacatctatttctgttggactatatgtgaatcctctcaaaatagaattattgtgtattgcactgagtctcatggttacctcactgagattgcccatgaactaaactcagtggtgactagcttaaaacacacacacacaccacctaccaatattttatgacttaaacatatatatatgtatatatgtatatatagatatatataaactcttatataaaagatgatctactgaaaggcggtggggtatggtggtggtagtgatttatagatgaaatcactcccacggcattggcatcttggcagtagcttattcctcagcttctctgaactaggcgtggaactccagttacttcccatatatctgatacatttaggctgcaacaaattcaagtgcttttcttgcttatttttcccttcttttagaacagaagaaaccagaaaaaaaatattttgtgagaaaacaacagttccttactctgtaccacctgcttaaatgcaaaccaaaggcactcaaatgatgcaacccaagagtgtggaagaggctggcggatgggctgtcacgtctggctgatctgatgtcagagcagatcatgtggtgctctgtgggcagctgggactggcccgccgaaagcacatggattacagtctgaggctgtaatgggaaagtcggttcctgggctgctgtctcatagacatcagcttgcagggaagctgggggctctccgaattgccctgctccggggcccctcctgctgcgtgactcacaggcacattgcagagagaagctgccgctcccagtaagtgcttaaagaaggtctttattcagagcattttggaagcggggaggaagtgtttgtgttgatagggggtgctggaagcctttgtaaaaccccctccttgggtctgggctgggcagcggcgctttccatgccattctggagttcaaaggcagcgctgatgtgcaaatgttccccagccctggttttggtttgttctccatgtgatgtgtttttctgatttgcattttctctttctgtaatcgtagggcagatttttaagatctggttaaagtgaattgatttatttgagattcccagccccagagtggacttggtgttccctgtatgataagcagggagaggggcaagagggtggtggctcttttggtcagaatactgcttgtgttaagacactggctgtgtctgtgccggagaaagtggttgccaccccttctctgcattgggtgagtaggtggtgtgagagaaagcgggggtgaaccagcagtaaagagatttaattagtttttggtaaacagcagtgctattagtatgttgcctttttttatggtcaaaatttatattaaatagtgtcagctggcagaacaggtgctggcagtagaagaatgatggagttctttctccctttcccagctagtgaattgtctttcctgcatcgaaagcccaattaaggagtagagagaaatgtaacagatacagatttctgagcagtgtttttttgtttgtttgtttgttctttggcttggtttttattttttattcctaaaaagcaccacattcccacactcatgcatcaggaatgattctcacctcgacgatgtcttaggtgtggcctttttggagagcaaaggaataaattcaataacatctttctcttcctcctgagcatataacattaagtttgctttagagactgaaaataaatgtgtgtggttggaaggagatataaaggggaatttagaagaacagattgtttatttgccctggcacttttctgtgaacacttgatagagttctaggtcaaggtgtatggtgtccccttgagggataataggcaaataattaggctatgtctttaagcattggaaaatctttattttttaaaggaagagaacctagtcttttctatgaatctctgcacaaaccagagactttggggccaaacactgattccagaaacacttaggcattgaagaaacttttgggtgagaaagatgatggtatgaatgcaaagaaaatatgcttagatgagttttgtcctttttttttagccttttgcagtatatggtttaagtcacagaacaacaaacaacagaagagagcatgccccacccagtgttgtgaacatggatgattcccctcccattctattccactgaactgcataaacactagcacagagacagttctaattcatcttttgaaccctgtatgttacaggtacaagccatataaaatgaagacatagagaaatggaagatcctcccaccccaccctactttctcctccttccatattgttgagtgaagctatattcatcttggaaagggtctgcatcactgcttgtaattttgttagccatttcttgtagacgagcacggtgtgaggaattcagaggtagtcttcctgatctggccctccgtctctgcctagaccacacccccttttttggccacatgcctaaaactctctgaaggggagtgtgataaaacgatgctcatccttgggcacatggattcctcggtcacaaaactgaagaggcctgatttctctgcagacacacatttcctgcttctcagggtgaagatacccatttatgggggttttagaattccttttctttaacacagtaatgtgaaaagaaatggaagaaaattatccatttttccatctcactcacacaactatgtttaatgtcctgtatcctcttcctgtctttatcatcacattaggctagctatgtttaatgcagaagggctatccacactccttcagatttctgcttttcagggaaggcacctgtagttacagtcttagaactggaccagaccctattaggactgatagttcagccatatttcacagagggtaaagctggtcagagttacacatctgatgagtgacagagttgggactagaactcagattgcctgactgcccagtgctccttctgcaatcatgcaacctaaggagagaacattttctttaaaaattaggtgtttttttcaatttctggttcttttttatttaaaatgctgtgtaattattagcatagtaaaatgactgtaatttcaccgtctttcccgaagaatgtcttgcaatagattggaaagtcaattttgtgtttttaaattagagacaggttcttgctatgttgtccaagctggactcaattcctgggctcaagtaatcctcctaccttagcctcccaagtagctgggattacaggcatgagccactgtgcctagctttgcctttgtttttctgtttttcgagatagggtctctctctgttgcccaggctggagtgcaggggcatgatcatagctcatgtaaccttaaactcgggttcaaacaatccttcagccttagactcctgagtgactgggactacaggtgcatgctgctataccgggataatttttatttatttatttatttttttgagaccgagtttcactcttgttgcccaggctggagtgcaatggcgcgatcttggctcaccgcaacctccgcttcccgggttcaagcgattctcctgcctcagcctcccgagtagctgagattacaggcatgcgctaccatgcctggctaattttttttgtatttttagtagagacggggtttctccatgttggtcaggctggtcttgaactcctgacctcaggtgatccgcccgcctcggtctcccaaagtgctgggattacaggcatgagccaccccgcccggccccttaaatgttttttgtagagatggagtcttgctgtgttgtcagggctggtctggaactcctgggctcaaatgatcctactgtgttagcttccctagtagctgggattacaggcatgcaccatcacacctagttcagattgggaaatctttacagagaaaattaagttctgttttcttaggaaagtagcatatttatattctttgtgggtcatgtgatgagatctcaaatacctgattgttatagttttctaatcttggctttctgagaatgtagactaccctaatttttttttttattttttttttgagactgggtctcagtctgtcacccaggctggagtgcagtggtgtgatcacagctcatgtaaccttgaactcttgggctcaagtgatcctctcacctcagcctcttgagtaactgggattataggcaagcaccactatgctgtcttctaccctaattaataagggggattattgttcagttatggcaaatcacataccacgagaacatttagaagcttcattctatttgggtggttttctgagtcatagatttttttttttttttgagaaagggtctgtctgtcacccaggctggagtacattcgtgcaatcttggcttaatgccacctccgcatcctgggctcaagccatcctcctatctcagccccaccaaatagctgggaccacaggtgtgtgccaccacgcccagctaacttttgtattttttgtagacacagggtttcaccttgttgcccaggctggtcttgaactcctgggctcaagcgatccacccgcctcagcctcccaaagagctgggattacaggcatgagccactgcgcctaatgttctttctttatacaaacctattcatggtgacatatttaaaaaccatttaaggggccgggcacggtggcttacgtctgtaatctcagcactttgggaagccaaggcgagaggatcacgaggtcaggagattgagaccatcctggctaacaccgtgaaaccctgtctctactaaaaaaaaaaaaaaaaaaaaaaaacaaaaattagccgggcgtggtggcatgtgcctgtagtcccagttactcaggagactgaggcaggagaatctcttgaacctgggaggcagaggttgcagtgagccaagatcgtgccactgcactccagcctgggcgacagagcgagattccgtctcaaaaaaaaaaaaaaagaaaaacaacaacaacaaaaaaccatttcaggctgggcatagtagctcatgcctgtaaattccagcactttgggaggccgaggtgggcagatcacttgaggtcaggagttcgagaccagcttgaccaacatgacaaaaccttgtctctactaaaattacaaaaattagctgggggtggtggcatgcgcctgtggccccagctactaggaggggtgaggtaggaggatggcttcaaaccaggaggcggaggttgcagtgagcaaagatcgcaacctgcactccagcctgggtgacagagtgtaaccctgtctcaaaaaaaaaaacctgaaataataaaaacaaaacaaagaaagaaagatttaaaagatgtttaattcaaaataaaatttcagattaattttttccctgttgagatcaatgctagacccacaagagatttaaaaaaaaaaacttgttcattgatagaacaaatatatagaacattgcaattcttgcttatgagtataatgagatttaaaaggtaatccaacattatgctgttccataatgtttttagaatgcccatctgttaattattcagtcttattttggtaagggtaagactcccgcgttatttgcttaaaataacgcacatgtgaataaatgtcatagataattcacctgtgttgatgctatttgtaaaagcaataaacacaaaattagattgggtgttgtttaattacaatttttggaaatctcaaattcaatacagaggtcctctgattatatcctggatatgcaatagtcagtttctactggttgagtgagggtatctcttcattgtagacattaaactgtagtgatatattgggagaaattagttctggtggctttgagtggtttcaaaaagaataattgggacactgttctaaacagccaacactgtctagctcagaaacaaatgactgcatgtgtgacatttctaaatggtgacatcttcaaggaaccctctaaatggttacttattttaagcttcaggttatggaggaaagaaaaaattagtcaggggatattagttgttaatggtcctagtatgaacagacagaaactccaaataaagatatcatttatttccaaaagatgtaactaagaggaaatgcaaaaaaaaaaaaaatgcaaagttcagtaaagtgaatagctgctgtactaattgtaaatttcactctttgaggtcttgggtgcctttaaccgattccatttaggcagaaagcacaagcaaatatctcttgttgtaaacaaagcaacaaatttaagttaatgctaatgtgttcacagccagagccaaaagtttttcagggttattataacacactgggctctcagcccatccatctaaatgtccaaagtacactaaagttatggattggcccattgtatataccatcccacatgagagccagatgctactgtttactgtgctagtgacttagccagattcaatgtgaaatctgagattactgtttggggtccatggaagttatagatggatttttctgatcatggatttaggcttctatacttcgatctgttttgattaatgccgatttttttttaaggacaatcttttaaacctaattataccctaaactttagatggagagtttccttgtaaaaattgttttcatttattgtctttggaccttggatgtgttgtaggtcttcagcatctatctatctatctatctatctatctatctatctatctatctatccgtctatctagagggagacagggtcttgttctgtcacccaggctggagggcggtggtgtgatcatagcttactgcagtctcgaactcttggcttcaagcgatcttccagcctcagcctcccaggtaactaagattacaagactacaggagagtgacaggactacaaccatgaccagttaattttttaagttttatttttctggagacagtgtgttgttctgttgcccaggctggtcttgaactcctggcttcaagcaatcctcctgccttagctttccaaagtgctgggattacagatgtgagccattgcaccccacctttagcatttttttttttttttagacggagtcttgctctgtcacccaggctggagtgcagtggtgcgatctcagctcactgcaacctccgcctccctggttcaagccattctcctgcctcgcctcccaggtagctgggactacagacatgcgccaccacacctggctaatttttgtatttttagtagagatggggtttcaccatgctggccaggctggtctcaaattcctgaccaggtgatctacccacctcggcctctcaaagtgctgggattataggtgtgagccactgcaccctgcttttagcatatttttattctttgttttgagcatggaaaagaagccatggaattctattgcatggcaaccacactagaaaatgtaattataatgcagattttaagatgatttggtaaaaaaaccagttctgtatatattgatttagaaaaatactatccactgtcttaagaaaatgtggcacatatacaccatggaatattatgcagccataaaaaatgatgagttcatgtcctttgtaggtacatggatcaagatggaaaccaacagtctgagcaaactattgcaaggacagaaaaccaaacatcacatattctcactcataggtgggaattgaacaatgagaacacctggacacagggtggggaacatcacataccaggcctgtcatggggtggggagagggaggagggatagcattaggagatatacctaatgtaaataataagttaatgggtgcagcacaccaacatggcacatgtatacatatgtaacaaacctgcatgttgtgcacatgtaccctagaacataaaggataataaaaaaaaaatttaaaaaaagaaagaaaaagactatccactgtcctcagttggaaagaaaatttcatcattcaagacccagtattatcagattttgttgacatagttagatcccttatcccttaaccctatctgatttggtttatgtccttttcatccaactaaactggtttttgaggaagtatcacaagtaatgataatactaccaataatactaccaatactacaaaagcaactgttgtaggggaggaaagatttcttttcctcatccattgctaagttcatggctgaggcacctataacaaaagacagattaaccagagaaaatcataaaccaaattcacttaattaatatatttacatgacataagagccttcagaaatgaagacccaaagaaacaggtaaatttgtacatttttgtgcttaggtttgatgaagagtagacagttgtggaaaagtatgattggacaaaggaggtgtgatctaatggtaataaactgggggacttagctagacctgtgtattcatatttgtctctgtgtccctgtgcctttggagataagaacattcctttcctccatatatagggtgggcacctctccatgagagccttaattacttatttcacaggaaggtcaaagaattgtgttttggcttacttcaggggagaaggtcaacgagtaacttttctgcttctactgcttcctcaaatgccaaagtgccatattttggggtagcaggtcctgaatcccatcactgctaaatgctgagcactttccatatgcaagaccctgtactaatacttcgtttatttagggacatttcacagatggtaagatgaacttgccccaaatgtgtgacttgtcatttgagaatccagtcagtccagactttctaagtctaaggcctatctcataacctgttgttactattttgactataaatttctatagagttgtgtagtctgttttgcttcagacttcgaaaaccacttgtgacatctgtaccaaacacagtgacaatggtctcactgcaacctgaaaagccagttgtccctggaacagaagtaacactttccctaccagcagtaacttttgaagaatcttcaggtgcagctatttgtcttccatctgtgaaaccttttgttacatctactgggaccacatctgacaagcctgttattggcactccaatgcaaatcaaacttgcccagccgggccctgtcctttcacaaccagctgggattccacaggcagttaaagtcaagcaactagtagttcagcaggcttcaggaggcagtgaaaaacgggtgaccacacttacacattcctcagcattgaccattcagaaatctggatagaagacaatgccagtgaacaccataatacctaccagtcagtttcttccatcttctgttctaaagcaaattactctgcctggaaataaaattctgttgcttcaagcatcttctactcaaaaaaataaagtaaaagagaatggaacaatatgcttcagggatgaagatgacatcaatgatgtgacttctatggcaggggtcaaccttaatgaagaaaatgcctgtgtcttagcaacaaactctgaattggttggcacactcattcagtcatgtaaagatgaaccatttctttttattggagttctacaaaagagaattttagacattggtaaaaagcatgacattacagaacttaactgttgctgtgaacttgatcacccatgcaacacaggaaaaattatgaagccttctagaaaaactgactgcaattgctcagcattgaatgactacttacaaggcaagtgaaaattacatcctgtgtagtgataccaggtcacacctcaaatttcttgaaaagctggatcaattggagaagcagagaaaggatttagaagaaagagaaatgttacttaaggcagccaagagtcattgtaataaagaagatccagaacagctgagattaaagcagaaagccaatgagttacagcaactggaacttgaacagatacagcatagagatgctaatctcacagctcttgcagctattggaccaaggaagaagagaccactagaacttggaagtgagggcttaaaagacaaccttcttgcttctgggacatccagcctgacagtcaccaaacagttgcttcatctaagaatcacaagaatctgcctcagggacttgatattttgtatggaacaggaagaggagatgaaatattctcgagctctatacctggcccttctgaagggaccactctactctccatccagatccttgcaatttactgccaaggaagacacaaagagcattgttgcactgttctgaaatttcgattcctggaacataatcaccaatatgaaagagcaaacaaatggaaaaacatttcatgctcgtggataggaagaatcaatattgttaaaatggccatactgcccaaatcaatttacagattcaacactattcctatctaagtgacaataatattttttacagaactagaaaaagctattctaaaattcataaggaataaaaaaagaggccgaataaacaaagcaatcctaagcaaaaagaacaaagctggaggcattacactgctgatcttcaaactataccacaggctgcaataaccaaaacagcatagtactggtacaaagacagacacagagacgaatagaacaggttagagaacacagaaataaagtcgcaaacctacaaccatctgatcttcaacaaagcctacaaaaataagcattggggaaaggattccctattcaataaacactgctgggataactggctagccatatgcagaagattgaaacatgactcctttctttcaccatatacaaaaatcaactcaagatgaattacggacttttttttttttttttttttgagacagagtcttgctctgtcgcccaggctggagtgcagtggtataatcttggctcactgcaacctccgcctcctgggttcaagcaattctctgcctcagcctccctcgtagctggaattaaaagtaccccccaccacgtccagctaatttttgtatttttagtaaagaggggggtttcaccatcttggccaggctggtgttgaattcctgacctcgtgatccacccgcctcggactcccaaagtgttgggattacaggcgtgagccaccgcgcccagctgaattaaggacttaaatataaaatctgaaactgtaaaacccctagcagaacacataggaagtacaattctagacacaggctctggcaaagatgtcatgacaaagattccaaaagcaattgcaacaaaacaaaaaattgacaaatgggacctaattaaagtaaataacctttgcacagccaaggaaactattaacagagtaaacagacaacctccagaatggaggtttgcaaactatgtatccagcaaaagtctatgtatccagcaaacgtctaatatccggaatctataaggcacttaaagcaaaaaacaaacaaccctatttaaaaatgggcaaaggaggctgggtgtggtggttcacacctgtaattctagctctttgggagatggagtcgggtggatcacttgaggccaggagtttgagaacaggctggccaatgtggtgaaaccctgtctctactaaaagcaaaacaaaaattagccgggcgtggtggcgcctgtaatcccagctatttgtggagctgaggcataagaatcgcttgaacccaggaggcagaggtttcagtgagctgagatgatgccactgcattccagcctgggtgacagagcaggactctgtctcaaaaatataaatgaatgagtgaatgaatgaatgaatgaataaaatgcagtttaaatccaatgtttgtttgttggttttatgtctagataatctgtctaatgctgagagtagagtgtttaagtcctcaactattactgtattagagtctatttctccctttatatctgagtgttccagtgttgggtacatatatatttacaattatatttatcgtatcctcaggcctagtgcagtggctcatgcctataatcccagcactttgggaggcgaaggcagaaggattgctttgagaccaggagttagactagcctgggcaacatagtatgagcccatctctacaaaaaaaaaaaaaaaaaaaggaagggcaaagacatggagagacacttctcaaaagaagacacacaggcggccaacaggcatatgaaaaaaattctcaaaactaatcattagagatatgcaaatcaaaaccacaatgagataccatctcacactagttagaagggctattattaaaaagtcagtgctgggcatggtgactcacacctgtaatcccagcactttgggaggctgaggctggcagatcacaaggtcaggagatggagaccatcctggctaacatggtgaaaccccgtctgtactaacaatagaaaagcaaaattagctgggcgtggtggtgggtacctgtagtcccagctacttgggaggctgaggcgggagaatggcgtgaacccgggtggtggagcttgcagtgagtggagatcgcgccactgcactctagcctggataacagagtaagactccgtctcaaaaaaataaaaataaaaaataaaaaaaaagtcaaaaaataacagatgctggcgaggttgcggagaaaagtgaacacttatccactgctggtgggaatgtaaactaggtcagccactatggaaagcagtttgaagatttctcaaagaacttaaaagagagctaccctttgacacagcgtctcatcactgagtgtataacaaaagaaacataaattgttctaccataaagtcatatgcacacatatgttcattgcagcactactcacaacagcaaagacatggaatcaacctaaaagcccatcaacagtggactgggtaaataaaatgtggtacatacacaacatggaatactacagtcattaaaatgaatgagatcatgtcctttgtagcaatatagatggagccggaggccattatcctaagcaaattaacacagtaacaggaaacaaaataccagatgttctcatttataggtggaagctaaacatggagtacaaatacacatggacataaagaagggaacattagacactggggcctacttaaaggtggagtgtgggaggagagtgaagattggtacttatcggttactatggttattacctgggtaacaaaataatctatacaccaaacccctgtaacatgcaattattattattatttttttttgagactgagaggtgacaacgtgctaacagcccttgctcgctctcggcacctcctcaggctacggcatccactctggctgcgcttgaggagcccttcagcccgcagctgcactgtgggagcccctctctgggctggccaaggccaaagccagctccctctgcttgcagggaggtgtggagggagaggcgtgggcaggaaccggggctgtgcatggcactcgcaggccagcacgggttccaggtgggcacgggcttggtgggccctgcactcagaacggctggctggagccaccagccccaggcagtgaggggcttagcacccgggccagcagctgcggagggtgccccgggtcccccagcactgctggcccacctgtgcctcgcttgaattctccctgggcctcagccatctcaccatagggcagggctcgggacctgcagcccaccatgcctgagcccccaccccctccatgggctcccgcgtggccagagactccccaatgggtgctgccccctactctgcagcgcccagtcccatcgactgcccaagggctgaggagtgcgggcacgcggcgtgggactggcaggcagctctgcccacggccctggtgcaggatccactaggcgaagcaagctgggctcctgagtcgggtggggacatggagaacttttatgcctagctaaaggattgtaaatgcaccaatcagcactctgtgtctagctcaaggtttgtaaacgcaccaatcagtgctctgtgtctagctaatctagtggggacttggagaacttttgtgtctagctaaaggattgtaaatgcaccaatcagcaccttgtgtgtagctcaaggtttgtaaacacaccaatcagcaccctgtgtctagctcaaggtttgtaaatacaccaatcagcaccctgtcaaaacggaccaatcaactctctgtaaaatgggccaatcagccctgtaaaatggaccaatcagcaggatgtgggtggggtcacatgagggaataaaagcaggctgctggagccagcactcctcgggtcctctttcatgctgtggaagctttgttttttcgctcttcacaataaatcttgctgatgctcagtctttgggtccacgccacctttataagctgtaacagtcactgtgaaggtctgcagcttcactcctgaagccagcgagaccacgaactcactgggaggaatgaacaattccggacgtgccacctttatgaactgtaacactcattgtgaaggtttgcagcttcactcctgaggccagcgagaccccaaacccaccagaaggaagaaactctggacacatctgaacatctgaaggaaaaaactccagacgcaccatctttaagaactgtaacactcactgcaagcgtccatggcttcattcttgaagtcagcgagaccaagaacccaccaattccggacacaagatggtctcattatgtcgcgcaggctggagcgcagtgctacaatctcaggccactgcaacctctgactcccatgttcaagcaattgtcctgcctcagcctcttgagtggttaggactacaggcgtgagccaccaacaccaggctaatttctgtatttttagtagagacagggtttcaccctgttaaccaggctgggttctaaatcctggcctcaagtgatccgcctcccttggccttccaaagtgctgtcattacaggcatgagccacagtaccgggcctgtagggtgtaatttacttatataccaaacctgtatatgtacccctgaacctaaaataaaatttggaagaaaaaaatagattttgcatcattttacagtcacaaaattattttattttgcccaggaaagactattgtttcttcatattgtatactctgtgcttactaaaattttgttgatatggataaaagcagagccattcaaattgtaaagttatttgtagagtagtgctgcagaattgtaaatgcctcatcctgatattgtatgatattcaatttcagaataaactaagtcctgtaagaacatttggcccagatgttactaaaaataattgttgctctaaaatttcacacagagaataacattccatggtcttctactgttatgcactattgcttcatttttccatttgggattgaaaaggagaaatttagaaaaatattttaaaaggatatatattcttgctttataacctccaatattctgcttcagttaaatctaaattgttgtaaagagacaactgtatacttgtgtttaagcactcatctgattaaattgtttgaaatttaagttggaaagagacaagtccacctaaagacagatagtaggtagcatactatatgttaggacatggagctagtacaagtaggttggaaggacagaaagtgatctgtagcagctggatgggaagactagcttcgtttggacatgggacagtttgaaaggtggtcttactttcagtttgaaccacaagagaagcagaaagaggcttggttgttctgatagtgaaggaaattccttagaagttctactgaagaaagccttggaatacagaattataaaaagttttaaacagaataagccaaacatgaggtagtgggtaaggggaggaaataatacgctgaaatgccaatctttagaccatagtagctctaaaatctagaccgctagaatattggattgaacagacagctggctggagatatctgattttagagatgtcagggcaatttttgcaagataaatctgataggtcaaaattagagtagtttaagcagtgactactctcatttacacttaatgattagttttgatgatacgtgatgcacctaggtgcctatatattttttcttttaatttatgaatgatttatgtatttttttttttttgagagggagtctcgctctgtcccccaggctggagtgcagtggcgccatctctgctcactgcaagctccgcctcccgggttcacgccattctccttgctcagcctccccagtacctgggaccacaggcgcccgacaccacgcctggctaattttttgtatttttagtagagacggggtttcaccatgttagccaggatggtctcgatctcctgacctcgtgatccgcccgcctcggccttccaaagtgctgggattacaggcgtgagccaccgcactcggccggaatgatttatgttttaaaatacataatagactgtcccaaattcaaaaggttcaaaaggataaataagtctttctttatccctggtgctccagttctcctcctcagagacaactgctgtttttaattccatgtgtgccttccgagtatattgtatgactatatatacatagatataacttttaaaacacaaattgtaacatactacatatgctattctgtgccttttttcatttaacatgtcttgaagattattctctgtcagtacatacaaagttgccttatgctttaaagaaatgttttattatgaaaaagttcagacatacacacaactagaacgtataatggacccccaggtagccattacccagttcaatgcatatatcaatattttgacattcttactatgtattagatgatattaaaaattattaactttgttaggtgagatagtggtttggtggttatatttaaaaaatgttcttagagaagcatcttgaaatatttatgactgaaatgatatgttctctgacgtttgagatttactttaaaatatatcagaagaaaaaagtatgcgtggaaggaatagcttgaaccaagattggcaaaatgttgaagttaagtgcatgcagattcattatatcattttctctgctcttgtatatgttagaaaatttctataataagaaatatatttgccaatctggttctatctatagctctcccccttttttggaagtatttaaaaatgaatcctagatattatgtaatttcatccataaatacttctgtatgtttttctaatattataaggacttaaaaaaacactacaaagccattatcatatctcagaaaattaacagtaattcttagtataatccaatatccagtccattttccaattgctctgattttctcaaaaatgtctttttgcagttggattgtttaagagtcaaattaggtccacatatggcatgtcttaggtctttcttgatctttaataatcagatattttaaaaaatcagatctttaaaaaacagacacttgtttctttgagaaactggctcatctattctgtagaaggccccaccttctggatttgactggtcgtttcctccaggtgtggttcaacttgttcctctatcccttatatttgagtcttgattagatttaggttcagtatatttgccaagactccttcatagggggtgcttgctctgctcttcctgctgtatcatctcaggaaacccatatttctcatgtttcactttgagtgatactaagatttaggagaggatttgggtggtgtcagcctcatctaccatcgacatttcacttgatgtttttggcatgcagtgattattaatgactgagtccattattccattagggattacaaaacgatttttaaattcttacattctgtttatacttattacttggaattgttctacaaagaagtttccctcatgactttttgataaaccaaagtatacagttggcttattctttttaacaaccacatagcattttattctactataatttaattggtcatctattatttaaagtatttgctctttttggtttgtttatattttttccaactgtattttctcatatacttatgcatttataatgaatagtaaactatataattttatagttatattttaatggaaaaataattatcagactttttcactctgtgtgtatgaatttagtataaatataagaggccagacctgtattttaacccttggttggttacttatttatcatatgatgatggggaaaattatcctttcttttttctttccttcaatttattagttctaagcctcattttcttaattcatatactgagaataataaccaatttctggatggttttaaggattaaattaaaaaactatcaaaatgcttggtaaagttcctagcatagagtaagtgctcattaaaatgaactttctgctaaaatttgaggaatagatggaatagcacatgcaaattctgttggatagggcttagcaaatagatgttcaataaatagtgccacttttctccatttcttaatttttccccaatcttagtagtaatgaatattactttttttccctaggctgttttcaggagtaataaataaatagaccttaggtgccctgaggtttttgctgtgaagggtcattctgttggcctttatggagacttatctggaattgctgggtcacagctttctatcctgggaggctgatatggtttggctttgtgtccctacccaaatctcatctcaaattataatccccatgtgttgaaggagggacctgatgagaggtaattggatcatgggggcagtttcctccatgctgttctcatgatagtttgtgagttctcatgagagctgatggttttaaagtgtggcacttcctcgctctctctccctcctgccaccttgtgaagaaggtgccttgcttccccttctgccatgattgtaagtttcctgaggcttccccagccatacagaacctcttttatttataaattacccagtctcaggtagtatctttatagcagtgtgagaaaggactaataaagagaattggtaccaaggtagtggggcactgctataatgataacctgaaaatgtggatgtgactttggaactgggtaacaggtagagtttgaaagagttttgagggctcagaagaagacagggagatgaaggaaagtttggaacttcctagagacttgttgaatggttttgaccaaaatgctgatagtgatatggacaatgaagtccaggctgaggtggtctcatatggagatgaggaacttattgggaactggagtaaaggtcactcttgccatgctttagcaaagagactggtggcattttgcccctgcactgaagatgtgtgaaactttgaacttgagagagatgatttagggtatctggcagaagacatttctaagcagcaaaccattcaagaggtgacctggtttttcctgaaagtgcacagtgatatgtgctcacaaaaagatgacttgaaattggaacttatgtttaaaagggaaacagagcataaaagtttggaaaatttgttgcctgaccatatggtagaaaagaaaaacccattttctggggagaaattcaagccagatgcataaatttgcataagtaacaaggagccaaatgttaatcaccaagaaaatagggaaaatgtctccaaggcatgccagaggtcttcaaggcagcccctcccatcacaggtgcagaggtctaggaggataaaatggtttcatgggccaggtccaaggctgctctgctctgtgcagccttgggacagggcaccctgcatcccagcagctccagttccagctgtggctaaaagggggcccatgtacagctcagtctgttgcttcagagggtgtaagccccaaaccttggcaacgtccatgtggtgttgggcctgtgggtacacagaggcaagtgttgaggtatgggaagctctgcctagatttcagaggatgtatggaaatgcctggaagtccacatgaaagtctgctgcagctgcagggatggagccctcatggcgaacctctgctggggcaatgcagaagggaaatgtgggtttggagacctcacacacagtccccactggagctctgcctagtgaagctgtgagaagagggccaccatcctccagacccaagaatggtagatccaccaacagcttgcactgtgtgcctggaaaagtgcaggcactcaatatcagcccatgaaagcagcctcaggggctgtaccctgcagagccacaggagtggagctgcccatggccttggaagcccaccccttgcatcagcattccctggatgtgagacatggagttaaaggaggttattttggagctttaaggtttaatgaccacctggctgggttttggatttgcatgggtcctgtggcccctttgttttggccaatttatcccatttggaatgggaacatttacccaatgcctgtacctcattgtatcttggaaataacttgcttttgattttacaggctcataggcagaagggacttgccttgtctcagattagactttgcacttagacttttgagttaatgctgggatgagttaagactttgggggactattgggaaggcatgattggtttcaaaatgtgaaaatgacatgagatttgggaggatccaggggtagaatgatatggtttggctctgtgtccccacccaaatctcatcttgaattgtagtccccacatgttgagggagggacatggtgggaggtggatcatgggggcagtttcccctgtgctgttcttataatagtgagtgagttctcatgagagctgatggttttaaagtgtggcacttcctcattctctctctctttcctgccaccttgtgaagaaagtgcctgcttccccttccccttctgccatgattgtaagttccctgaggcctccccagccatgcagaactgtgagtcaattaaaccttttttatttataaattatccagcctcgggtagtatctttacagcagtgtgagaatggactaatacagaggccctgctgcatactgggaaatgcctgcttttcaggcagtcccaatctggaaaggctcagatggaatgcaaacagcacttcatttaaccctgagttgtggaactagagtgaatgttcctctccttctctctcttggacttcctacctcatccttggtttccagttcattgttaggattagaaagttatcctaataggctgggcgcatggctcatgcctgtaatcccagcactttgggaggccaaggtgagtggatcacctgaggtcaggagttcaagaccagcctggccaacatggtgaaaccctgtctctaataaaaatacaaaaaattagccaggcatggtggcgcatgcctgtaatcccagctactcgggaggctgaggcaggagaatagcttgaacctgggaggcagaggttgccgtgagtcgagattgtgccactgcactccagcctgggtgatatgctaaattatcttttctagtaactcacaatactaccgtttctcctgtgcctttggtatttcactttctcataggttcttcatctttgtaacatcttaggccttagctttagtcttcaactttcccctatcaaataatggccaatttttcctctttcctctgtggacttctggcatcttctcttctgttcctttctcccctccttttgtaatctttccattctcagaagcaccatctgtccatgaagacattttgcacccctcgtttggtaacactttgtccatgtgatggatagagctagcctttctcagcattacctcatttctttttcctatgtttctaggtaatagctgacacatactgtactttcattcacaggtcccagttttaaaatatacagaaggcagaaaggttaagtgatttgaaaatgtgtgctgaagataatatagtatcagcactgtaaactggaaaagaacaattggctccctgatgctcaggatcaggcttttttttttcaatgaaatctgctgatggagcatacacatattttagtgacagcctggaaaacaagagccatttttggtcattctagtgcattccttctattttgatgtaaggttattatgaatatgtgctgagtctttaaagagtagatgataccaaatattttgacaaattcgaatggttttcctaatgtattaaggtgtggtttggataaaatgaatgccattctgtgtattaattcagatttggagcatcaaaaactatcacaaaatggcactgcttctcaaataaaaggtgaagtgtaaagtaaagggaaaacatcaaagaacaaggaagcggcttattttttcaattgttttacaattaatccatgatatgtcagttcagatgtcaatgaccagctttaaggcaataatgatccatgtctgctctttatcctgggtatagagattttttgattgaaggatgactttaaagagaattatatgcaacagttgaaattttgccttgcacattctttgtaccatatttttccttcagggaaaaacctcttaaaaatgcctatttgtaatctttcttggccaggtttgtactcttctgtatgttgagctatggcctattgtttccattcattcgataataattgtgattcatttgataataatttattaagcaattactatatgctaggtcttgtgctatgtgctggaggtacaaagatgtataggacatggtcctggtccttgtccttcctctaacagcaggctttagatcaaacatctctgcttgaattaacagggtttcccagtgtggtttgtagatcaactgcatattcagctactgaatcagaatcttgggatggacttaggaatctgtattttcatctgatgactcttatgcactggcccaggacatggtaggagtgaggtagttaatagggagatacagtgatacagcacattcctcagagagagcttccattcagctttgatatttctgggagtttcctcagaaggggaacaatttgcctggcttgaaggttcctctggaggtggcaggctgaagtgctactgtaaattctagaatggtgcaaattctgtcctccagaaaatcagttctggatcaaggggcagattctgggttaggttgggagtgctggatgcggggataagggccacaggcttatatacccagagggtccataatgtagcccctggggtgtccaaagaggaagaatatagctgacagctaatacaattaggattcatttagggacggaaaaatgcaaagataaaacaataagagttaacacatatacaatgtcttatatgcctaagtgctgtgcaaagcactttgcataaattaattaatcctaataataatcctatgaggtgagtctagtagcatcatcctcattttacagataaggaaacagagaagttaagtaatttgctcaaagtcacacagtataagccaggattccaacccagggagtgtgatgcagaatgtaagctcattcagctgcctcttagaagcatcatcatttaaaatgcagaaagtacagtgggggtttaaactcacatctttcctgctgttatatacttgagtatccatatctttcagcttttcaccaaaataatactttcccttccccacaaggaacacttctggaagtcctgacaactgccttcttaaatgccttcagggctggtttcttctgttttagagaagaaattacacccttccctttgctgttaccttgtaatctagatgcatatgaaaagcccctttacagcagatctggtccttcactgcctgaagactggatgcactatttttagagacaaagccacaatatcttagtctttaagcaagtgtgtgatacaagaaaacgcacagtgcatatttagaaggctgaacaacttttcagtttcttttttaaaattttaattgcagattgggtgtctgaaggctttcatgttatacgttcagtaaatatgggtcattaataaaaagttgaaaaaatgttaacaagggaaaatacatttgaggcaagtctgagcttccaacagggagagttatttgacctgagttctttttcaggagctatgtaacattattacatattgagctgatgatagacatctggcatgcaaacagatctgaaggtgcattgaatcagaaggaaaactgtggactgtgagatggttctctcttattctgtagaatgaagagtgagaggctgccatttcttggaaattatgcccaaatggcctgacaaattgggctttatcctggcttccttgtttggagaattaaacccacaaaacattatcttactgaccgaatcattcttaggtataggtttgctccataaactcttactcttccattcaacaaacaccctcgcctagctgtgtccgcacttgtagccctaccacagggcaaagttacttctagctatggacagatacatgaagttctcacagaaatgactgttgaccccactgaaaatccaaaaacaaattatttttattaatttaaagtaattattttcccattaaaaataatatgtgcttcttattaaacaaatccaatagaagaagacgtctttgaagaggtgaatgatcttcacccaaaattattttctttttcttttcttttttttttgagatggagcctcttgctctgttgtccaggctggagtgcagtgatatgatctcagctcactgcaacctctgcctcccaggttcaagtgattctcctgcctcagcctccccagtagctggaattacaggcgcccacaaccacacctggctaatttttgtattttagtagagatgggggtttcaccatgttggccagtcttgtctcgaaatcctgacctcaggtgatccgcccacctcagcctcccaaagtgctgggattacaggcgtgagctaccacgcccggcccaaattattttcaatgttgacaaatatctggtgcttctcttaaaataacattcccactgaagaaagcaatagtttaaatctctgaaaaatagagtaatgattcgtaagagttattcctttaccttaatccagtggtccccaacctttttggcacgagggacgggtttcatggaagacaatttttgcatggacttgggggcgaagaatggcttcaggatgaaattgttccaccacagatcatcaggcattagttagagattttcataagaagcccgtaacttagatcccttgcatgtgcagttcacaatagggttcgtgctcctatgagaatctaatgccaccactgatctgacaggaggtggagctcaggcctaaagctcgctggcccactggccgctcagctcctgctgtgcggcccgcttcctgttgggccgcagactggggactggggaccgctgccttaatctattaagcaattatattagtttcttgttgctgctgtaacaaagctctatttaagacaaaagacatttattatcttacaattagagatcagaagtcccaaatgggtttcactagggctgaaagcgaggtgcccgcagggctgtgggctctctgaaggctctagggagaatctgttttctttccttttcctctagttgcctggggacaaccgtcttcaaagcacaccactccaacctctggttctgttgtcacatcaccttcttcctctttgactctctttcctttctcatataaggagccttgtattacattgggtccacctggacaatccaggataacctccccaactcaaaatccttaatttaatcacacatgcaaagtcccgtttgccgtataaaatgacatttaagggttccagggattaggtgatggacatgtttgaggagttggtgttatttagccttcacggagatgtacaactcagatttgctaaaagattttgtgtactagaaatttatattaaattagcacttcttcctcaactctttttttctgttttcatcccaagtacccaaagctccattaagatctcacatttgatttatctgagaactctcaacagtggtatgaagaggctgcgagaacaacattttccaaacagaaactctagtggcccagcaatgttaggaggtgttctatgttaaaaagtgttctgatttagataagattaaaaaacaaaacattgcatgtgccattccacccaccttcatctttaatacacattagcatatggaaaaggtactgagaattctattgtctgtgattcccaagtgcgtttttgcacttgggaaaaaatgcaatttttcccaaaatgaatgaatttcccaaaaaatgaaaattttttttctttttctctcttttttagaatgcttatggatcacctcaaggaataccaatgtattatgtttgagaaatgttgtccttaatgtattatagtttttcgttctaaaacttaactacgttaccctgaaaaaataaatacaaaaggcatattggagctgattctaaatatcttctaaatgacagctctcctgtttaatcttccttctacctatgcagaacttaggtttttttggactttaaagcaattgactctcaaaacctaatgctacaaaaaccttggttctgtaaataagtatttagaataatattatatgcatacaacaattttgtgctagacaacacaaaattgttctggaaaaagtaagataatcctttgaatgtttttcaagatgtgtggaaaaatttactattgtgaatagtatgtcagactcacaggactgaaatatatcttaaaaagctgtattcaccatttccctattttgagaaggtaaagtggtcgagaatggtacttaataacttacatgattcacctgacagctcccgacaatggtgtgaagagggccttagccttctcacctgggttcatgattggactacccttagcatagggtggcaatgcaatctttgccagataagactttctttgcaccttccttgtccctttcttatgacaacgattatattttatcatacattattacttacatgttatcgcttatctgcccaaagtaaagctcttgaaggcaagggccataactgtacccctcatgaggcctggcttttcctttatcaggaactgtgccaatgtttgcaaatgagtgacttaggatggaaattttagcaatgtcaggtgtgtacttcaatcatccatcagttgatccatccatgtatacttttttctacttaaagtttaagaaactcacaaaaatatatgtagaacaaggagaaagttaaatcaaaataggtaaaatacctaaggcaaaggaagacaaggtttggaaagtaaaatggatttaggagtgagcctagttcttaaaaatatttgtcataaaattttatgcatctgtagggggaggacattgtttggtgttaaggttactaggagccagtgaagaaagcaattggttatttgatttttagtatccataaaattaagatgtcagttgctcacatgaatcatagctattcctagaaccagaatcaatgagaaaatcctctcatgggatatcagaaggagtttgctgtgtaatataaggaataacgtaaaaacatattcaacttatctttacaccaagcacagcaacatatttcagagagaaatttcttatatcagtcttggtttatatgatagtatccccactgtgacgacgtaacttaaataagaagtacagctgtagaaaggagtagacattggttcataaaaatcctaccatgctaacaaaattgcaaaacacttatcaaaactttttattttggtaaaatctgtacttaaaatatgagtataaaagttcaccagcaagtaaaagaatgtggagtaatgcaacatatattgcctaattattagaataaataaattgtaatcaacagtataatcaattttctgaggttagggctcaaatattgatgaacattatgtacttaggtgtttttttttttgacttttccctgtatatataacttcaggatgcagcaaataggactagttattaaacaacagggacaaagttagttaaatatagaatagatttcttccttaggttgcaatttaagcttctttttagtagaaggaaactgactctagtgagatttcatagataccaattatcccagaaaatgatgacctaagaggaaggtgtgagaatagaaaccaattaattaagggcaggtacgtggagccctctcctggggttggggaagttgaatggaagtgttctaactgcagggatgtgatagatggaaatcgtgtgtcttctgggaaattaactgacattcacttcccttcctttgtgtctgtgtgggtttaatattgccatcatgtaatagaggcaccaccaatgttagtttggaaatacctgtcaacgtacaagtatttactaaaaaagtttacagaaatgtagattctcaagttatttttaaatgttggtgattttcttgggatgttgtcttcacatcggtggttctggggtaggatcaaaacttaccttgacttccttccttatttctggtgttatgactgatgggcgtgcccaaccagatccaggacagtaaatacatcctcttatttggtttctaattcctttgagttaccatggctttactttgccccacacttaggaatttgggcaaacctgtatatgtttttctccatttcttcttacttcttgaaacagtagtctttcctaactgaatctgcttctttccttcctattaaatttttttctttctttcttttttttgagatagggtctcactttgtctcccaggctggagtgcagtggcacaattacggctcactgcagcctctctggctcaagggatcctcccacctcagcctcttaagtagctgggactacaagcgtcccaccacacctagctaagtactttttgtactttttgtagagacagggttttgctacgttgcccaggctggcctccaactctgggctcaatcgatctgccctgcttagcctcccaaagtgctagctaggattacagacatgagccaccgcacccaaccctattaacttttaataggccattcgtccaccctattacttcactgacattgttctggccaaagtcacgaaattcattagcttctttttaatctccatcttagtttccttctgccccattttatattcctaaatgggtcttcctttttgaaacactcctctcctctctcttgatctcttcctgtctctgtggttttccttcttttcagtctcatcaaagggcctctgctcaccttttagacattggctatttattattgtgctcctttaagtttcttttcttcttttcctgggtaatctcattcatcctcatgtttcaatatatgttgatgatccctgcatcagtcagagtgaggctaagctgctgtaacaaagaggtagatgggtcgttttgcccatgaggtcatcaaagaactcagttttcatctctcttgttgctccaccattccctaatgtgttatccttatctacaaaatccggagtagtttagcagcaccatgtctgtgttccaatatccaggaaacgaaggtcaagacttccctcctgaggaagtggtaaagaacttgtacacaacagttgtgctgaaattacatcgatgaggatatagtcacatggccatatgtagcttcaagagaggctgggcaatcagtagtcacatactctgtgaaaactgtgagtataataacttcaaagaagaaaaagagaagggatagaaggacaaaattatggtctctgctcaaataccttcagcctccactctctgatacttcaggtctacagatccggctgctttgtgatgtcttctgtgtgtcctgtggatactgcaaactcagcatgtcaaaacaaaacaaaaactcaactagtcgttttctactaagtttgctgctcctaccacttttctctctctcagtggtattgttactcagttgttcgaactagaaatctcaatcattcttgattcttctttatatcttactctccacagaaaatttgttaccgagttctatttaatgcttgaatctatcctgctaccactgtctatgtctattgagaccctaaaaaaactctatcttgtattatttcagaagcctcctaactggtcttcagcgcaaaaattgtttccttaggtgacctgtcctctgcacggctaccatatttgtctttctaaagtacatatgggataacttcattttaaaatatctgtaatgaccttccatttgccactgtgtatcttctttaagtatgatttttagaaattgacctccttttcccccttaaaataaagcctatataaaccccttcaatatataaaaaaataaataaatgcagaacttcttgtatggcattgtccttagagggtagtttgaaaattgctggcctacaggattttaatttaggttacttgctagtaactagaaggcccttcacagtctagttctagctgactttcccaaacttacctgtagccagaattctcatcatcttccctgttctagtcacagtgcattgcttgcttctctcacacatggctggcacttataggtctatgtttgttcctgtttcttcagtaacgagtggtgtctgcccatcattcattgagcacagaatgactcacctgaaagagcatgcgatttggagcgaggcagacctggattaagagctcatctctgccttagtttcctcatcagaaaaatcaattattttattttattttaattaatgtatttatttgagacagagtctcactctgtcaccgaggctggagtgcagtggcacaatcttgggtcactccacctccacctcctgggttcaagcgattcacctgtagcttccacctcctgggttcaagcgattctcctgcctcagcttcccaagtagctgggattacaggtgcacaccaccaagcccagctaattttttatattttttggtagagacagggtttcaccacattggctaggctggtctcaaactcctgacctcaggtgatccacctgccttggcctcccaaagtgcggggattctaggcatgagccaccacaccctgccagaaaaatggatttaaaaagagaattacataaagtaccgaggccatagtagagcttcaaaatgtcagttccttccttctccttctcaaacgtcacttctactctgtaattttttgtgtgagtacaagaaaaaatagttttctccaatctgtgtttttatagcattttataatgcttctgttatataagttttattattatatttatttatgtttttggttgtctcacctgctggactttgagctccttgaaggtaggagtcttgacttactcacctttgatccttagtgcctagcaaaaatagacatggaataaatgcctattaaattgaattgcattgaattgaatagaaataaattaaagtagaaaaataaaggtcaacccatttccttggctttgacttaccttccccaaaagaatggagaagagtttgatgaatgtgtgaatgctgttttgtaatagaaagaagcagtcttctgattctgaatataaatagcaactgctgggctgtgaaacaatctgcaaaattgcatttatcctggagtgttttgttttggcatcagtgggatagaatgtagtttcatagtccatgtttattgaaccatgtaagggatttacaggagcatctgtatggaggccaaagttaaagtggggcactgtcccaaaaaagtgacatgtaagacaaattgatgtattcaagcattcagagttgacaacataatctgctatttttatagaggacattttggcagtaggtgtagggtgtttatatatgtgacaaaaccaagcttaatatccactcccctcaatcctcttacaaatacctcttctttacatctctatttcttttaatgacgttaaaagaaataccagtctttgtgttattcaagtttccaaagtttgaaatcttgaaattctctttttcttttcttgtgtccacttcaattaatagttgcctaagcccaatcaattctatagcagttcttacattctctctctcccccagctctcttcactgcacatacctggtttattactcctttctggatttccatttctccttcttctttgttatctcttacctgtcgaggctagttaatatgctgcctctagtttatagttcttaaagaaaagtagcatatgtctagtcatagatctgttcagaatacttagtttcctcattgctgtccagaaatgtctaaatgtctctaagatctatctttaatttacctttccagcttcatcttttgttcccttcttctaatccttatacagatttgatggtttaatcaaacagggttgtgatggttaactttacatgtcaacttgagtgggcaaagggatgcccagatagttggtgaacattatttctgggtgtgtctgtgagggtgtttccaaaagaggttagcacttgaatcagtagactgagtaaagaagatctgccctcaccaatatcggcgggcatcctccaatctggtgaggacctgaatagaacaaaaaggtgaaggaagggtgaattctcttcttgagctgggacatctatcttctcctatccttgggcatcagagctcctggttcttgggcctttggatttcaagatttataccactggatcccttacccccactttcattctcaggtcttcagcctcaaactgagagttacactatcaacttccctgtttctcaggcctttgaacttggactgaagggcatcaatttgcagatggcataatggtgggacttctcgaactctataatcatgtgaaccagtttccataagaaatttcatctatctatctatctatctatctatctatctatctatctatctatctatctaatttgttcatccatccatccattcatctgtccatccatccatccatccatccatccacccattcatctctctgtccattatatttgttctgtttctctggagaaccttgacaagtacagggtttaagagttgttgttcgtttcttttttttttttttttttcatagtgcctccagttttttttaacatttcctgtgctagtcttttttttttttttttttttttttttttttgagacagagtctctctctgtctcccaagctggagtgcagtggcacgatcttggctcactgcaagctccgcctcccagattcacaccattctcctgcctcagcctcccaagtagatgggactacaggtgcccaccaccacgcccagctaattttttgtatttttagtagagacgggatttcaccgtgttagccaggatgatctcgatctcctgacctcgtgatccgcccgcctctgcctcccaaagtgctgggagtataggtgcaagtcactgcgcctgaccttcctgtgctaatctttttgcttgggatgcacgagaatgctttagtgactcttctttgatcatttatctctccgccatcttttgcccatttctttacattcacccttaaaaaatttagtttcaactctgatgtatatgttgatacttctgaaatcagcaacaccatgtatgatttcgttacttgaaggacattactaaggttttatgggaccaataaatagcactcgtcctctatacctgaggtcggaaccagtagagggatacactagaagtaagacagatgaagaccaaaatgctgtcttcattaataatagagctgaaaccagaaaacgtggcttatagttgtggaaactggacttcctaatactgaatctcaaattatataggccactttgagacttaaggaaggtggggtagaagagaatgcaccccttgttaataattgccatccaaagataacgaggagaggaaatctcagtgctttccgtgtccagcttttgctcccaagttccccagtcaacctcacgtggggaggggtgagcgaggaggtggagtgagaccaaggtagtgacacttctggacatccctccacatggaggaaactttgggagtgagaagagcatttctcccataccttctgtggctatcttcccaaatatcccaccatcacctcaagtccactctcatcacattctcctcaaagctactttcttctccacttgctaggtttcgctagaactttgtgtcagttttgattcaccttccctcatgtgccatagagtcgaatattaaagtacaattacttttctttttcttttttttttttgagatggagtcttgctctgtcacccaggctagagtgcaatggcatggtctcagctcattgcaacttccaccccccaggttcaagtgattctcctgcctcagcctcccgagtagctggcactacaggtgcatgccaccacacctggctaatttttgtatttttagtagagacgaggtttcaccgtgttggttagggtgatctcgaactgctgacctcgtgatccacctgccttggcctcccaaagtgttgggattacaggcctgagccaccgcacctggccacaattacttttctttaaaatacttcttttacttgtcccttcttcaacagtgctgtcacaaacctatgatgaagcctaagcaccctaaataggtttgtcaaatctgtcagtgttttcctttgcttctagtttgctttctgaagaaggttgttcataaatctgttgtatcttagactagatagaaactggaatttaagtcttcctctattgctctaatacgtattatcctttttacaacattctccaacatgtaacagaactttagaaaagatgatggttttggaacacaccatgctcattcctatatgcacctttgcccagtggacctttttgcctgaaaagcaaacccttgactcttcatattcttcatcttctaactcaatttccacccagatggctctctgtgtactctagatcacacctctgagattgtacttaaaagtcagtatttaaaattaggaacttggttgttatcaaattgcttatgtttcttttaaaaaatctctttccaacttattttgaaggaattcttatacattttatgtctgtccaccctttcccaacatttctagtataggctaaacacataggaaataattagtaaattgtatgacttgatcaatagagaatcttaggatagtatgaattatttaatatgtttgaagttaaatatctaggggaagatacgagtcttaaaaaacaacaaacatttcttctatgtttcctaatttagaattttcttaaatgaacagatgtttacacatatcctatttaaaattcttctgatgcattccttgttggataataatacccttttcttcggtgaatcccaagtgagagtattggaatggaatactgacaggaaaaaaatgttctcaagataacacatggcctcaatcaagaaagcatcagaagaaatgaagcaggaatttggagaaaagacagatcgtcgtctaggctcattgattttaaaagaaaacatttgggtgcatgtaatatttaaagtcactttgtggaccttccttgttggaaatttgttgttattgttgttttggagacagggtttcactctgttgcccaggctggagtgcagtagcatgatcatggctcgctacagcctcaactgcaaatgtgtgccaccacatctggctaatttttttttttttgagacgaagtctcgctctctcgccaggctagagtgctgtggcgtgatctcggctcactgcaacctccaactccctggttcaagggattctcctgcctccgcctcccaagtagctgggattacaggcatgcactaccacacctggctattttttgtatttttagtagagatggggtttcactatgttggccaggatggtctcgatctcctgacctcttgatccgcccacctcggcctcccaaagtgctgggattgcaggcgtgagccaccatgcccggcctttttttttttaatttgtagagatgaggtcctgctatgatgccaggcttgtcttgagcttttgggctcaaagcaatcctcctgccttggccttccaaagttctgtgattacaagtgtgagtcaccacgctcagcctaaaatgctcttgatttataatgactcctatttgtctctgatatgtataaaaggaagtttccttaaagaaattcttttaaaaaaagatcttgtcttacctatatccacagaattgtttcctttaagtagatacagaacaacttgagaaaggttcatttcctaagctttattgttcttaaatttcagttattaaaaaattagctaagtattataaattagctaaccagttgagtcttccatttttacaaatattttggacagttaagaatgggggaaatctaggagaaattggaaatgtttcttaattcacaaggtttgagaattgtggagaggatgccgtttctaggaatggccacaagatggtgtagaaataaatgcattaaacatacataagtgtcattcattcaatcaataaacaaacgtttaataatctccaactacatgctaggaataatgttaggcataagagttattgaaatgatttatttatagttcctgtcctcaggaagcctagattctagtatagggagatgtacctgtaagaaaataaggacaatagtgcgttacagggactataatagaactatagatgaggaggaatggggacccaagggaagaagtgggcacttctatagagaaggggtgaggagtgtggatttgtaaagaaagcacagaggaaatgattcctaaacagaatcttataaacttggtaggtggttactaggaaggacattgtgtagattataggattgaaggttgtgtggcttggaaatacaggatggatctttcggaggaaaatatgtgagtgaaagaccaaaaattgacgaaacaatctggcatgtttaaggaactttaagtggtttaatttgattaaggtgcatggtagaggaggacactgaagataatgcaggccagataatgaaagcctgacatgctgtggtgatatgatagccttgttttagggatatcactttgatagtagtatggatggtggcagggaggcagggacatgagctgggagactattgtagcctccaggtgagagatgagggctggtactgtgagaatgagaggaggttaaatccacatgacttagtgactaaatggctgtctgaatgaggaagaggtagtatgctaagaaggcattaagggttctagcttaagggagtgtgatagatgattgaccaacattggaactgcaggaggaagattggctttaggaggaaaacattataatgagttcatagtggatatgtagtttcagggtttggctgaggactggtagtccagaggtgggagctggggtgaagaaagggaatgggagaaacactgttccagagagagagctcagtgtgggaggaatggagtagaatgggagggagggtggtatgatttaatttgggttatttaaatctttgtatttttttcttttgactgggtgttacagaattaagttgaggacatatatagtcagaccacaaaacagtttagtttattatttctaaacattaagctccaatgacacaatgcaatattagcatcctaatattctttctctcgatgtagaccttggaaagagaaattgcactgttaataggagtattttttgttgtttttgtgacaattaaatgcttggagctagggctatgtatttacagaaggactcacctctggccttgtgcagtttatgattcctggtgggtggcactgcctgctgggatcacctcgacagcagcactgctggcccagagctgtgttcttctgtaatctctcactgtccaccagtctgctcatactgaagtgttgccaacacttctgctctattgtctttgttcgttgtccacatctgctgaaacaactttcagttatgctaaattgcctgcctgggcagcctaatctatagctattgattatggtagtacactgacaacaggttgcataggtttttgagaggtaaatttatttctcttccctgcacctcctcaattggccctatatttttagagcacaattttgtagaatacagtctttttccccctgaatgtatatatcaagttatagcagaaatacctgtaatgatagtaactaatacgtatctagtatttactatatgccaggtattgtcctaagttcattacatgtattaacaatgctatgacttaagtactattctaggtgacaaaagtagaggtgcaggaaggttaagtgacttatccaaggtctcacatctggagagtgacagagccagtgttcagaatcaggcaggctcactccagagtccatgtctggatatggcttgatgtgatggggcagcgttacctggaatgtcctcccctttggatttgggctgcccacctttggtctttatgttcctgctgtcattttaatggtcttaggagaaacatgagaagagtgtcatataattccatttctgggacttaatttatgtttcatgagcagtggtgagtgaagtttagatgtgggtgcccgcccaggaggtgagtgaattcatgatctctggacttctgtttggcttgctcatttctatttggactccacatagaaatagattattaaatcttaggactttacatttttggactgtcatttagatgtttgattttcttttgactatgtctagtattctaagtgaaattacatccttagacaacttgtttttgttaagctaaatagtcctgaggatactttttaagcgtgaaagtacagcaatttattgcaaagcaaaagtacacgcttgaggaaggggaatgcaggcacattcaggagagggagtcgcacctcaagaatacttttaataaaataaattttatttaaaccaatagttcccaatgtcttacaactctttgcaggtaagctgtacttcttcctaatttatctgtgccctgaatgcttcttaaaaataattttttaaaagtgtattattggccgggtgtggtggctcacgcctgtaatcccagcactttgggagactgaggtgggcagaacacttgaggtcaggggttcgagaccagcctggccaatatggtgaaaccccatctctactaaaaatgcaaaaattagctgggcatggtgtgacacacctgtaatcccagctactcaggaggctgaggcaggagaatcgcttgaacccaggaggcagaggttgcagtgagccaagatcacgccactgcactccagcctgggtaacagagcgagactccgtctcaaaaaacaaaaaagtgtattattaaactattactcagatacttgctagaatggtaaggaaagactttattcaggagttggactagctgtcacaactgttgtaataggggagagaaattggggtcaactcttaatatagcaaagccagttgaagacgtatagccaatgagcagaattagggggtcagggttggaaaattactgaggagacatcaagggtcagggggttgttgccaaaacaacttaacaggaactttgcagaaggcagggcaaggtaatcaaatatcaaggatggagagtgaagaatttgatcagatatcaagagtgggggattctttctaaactgacttagcaagatttttgctaaaactgggctatgcaggtctggcaaagatggagtcaaagatgaggcttagttgagaagagagttcaggagagcctgattaaagtttgatcaagaagagagtctttttcagtaggaggagaaaaaaaagtttttaaaagaaacttttaaagacaattaacaatagccatgtggatgaaattcagttctctaagaaggctgaaatggagaaaactattctaagacttgttgagcattcactattttaaaagttaggcaatatcaagtcatcagtttatgtaaggttgtttaccttcagagtcaccataaacatattatgccaaatgtattctctcttttaatggccctagcaccaaggacaggtgttcatgaagatttcacaggcatattgaaaaactactgggaaatactcatctagtattttcttgtatatcatgtttaaatttacaagagcatacttgcccagaattccgcatcatggatattccaagcctttcacacattctacaaggctctagtcagggtttaaaaagaaataacatgttactatgctgcagtgattcacctcctgctgatgagtcacctcctactgattagaaacagagtaagagaatgttaccaatctgagttggttggacttgaagtatcataaaatatgcaggggtgggtctggatactaagggatccagtgctcctgaagttttaatgtgcatagtaatcaaatcattcaggatcttcttaacatgcaggttctgattcagtgggactgaagtaggacctcagattttgtatttctaatgagctcctgagtgatgctaattttgctggtcctaggaccatactttgagtagcaaggacttaactcaataggaagtagaactaagtgctcttttgagctctttatttacttttctccactaaaagtaagattgaatagttcctagtttcaaaacatatatatatgttcttgtcacattgtaaagaaagccaaaattttaaatttattacttccataccatggaaatgactgttgtttcatggaaatttagtgcattagttaaaggtgtcactgattcatcagttctagtatcctttgtaaagaggaagtttttttttgagtataaactcctagtaagtgacaatattactgacaataacataattgattataatattactgacaatatttttagtcacaaaaataaggttagtaaaaaatagaactattatatcttgagcacagactatgtgctaggcattcttcaaggtgctttttatacgttacctttataagcccttatatcaaccttgcaaggtagatattattaaatactttttgattgatgagtgagaaaaccatagttcagagagttaaggtatctgtagtgagagaagagaaatttgaacttgggtttccaaagttgtgtctaatctattagaaccaatttggttgttgcaatgcaaataatatcaaagtcctttattttcccaggaggattctgttcttcgcattcttagttcatgcattgactgaaacaaagggaaagttaggacttggcaaaatgattctgtctaggactattgctgtcacatctttgaggacaaagatcagtcagagactatttaactatcttattttctacctggaaagtttcccttttcttgactttctcttcacattgtaggtaggtaatccttttttcttttttccccttttgcccaggctatttgaccattcaacaactgttggatttgtttgaaaaatattcttagtagcttttattggttaatgtcctggggacatgggtctcctcccgtaaaacctttgtgaaacaagtctcaatgaaacaatgaaagcaaggtttcagaccaagttcttctgtacctacaaacatttattagcaagaaattcagaaggatgatagaacttgtttgtggggttacctcaatctttatcctttggcactctgcactcttcctagaactttccatgaaaacctcgctcggaggcagacacaagaaaaggttacatcaaaaggagattaaactgcccttagggtgtagattaaaaccagtgtatataaccaaccacagcatcccccctaatgatgctgaggtctttgggagtaaatgatgaataatatgtctagcacaggtttaaacggtcacttggcccttcctgggcaaagcaaaagagagaacttagccttttccttagttgcactttctcaattaattgtattttacataagataattatgattgttgcaatatttacattagaatactatgtcttttaaattcctgctattcttacgtggttccaaaacctccttctggatttgggaagagtgagaggagctgagcccagttaggtgtatgttttactgatctacctggtctctgctgctgcctcctgtgtccaggaaggctccagccctcagggaggagagctgtcctgtatctaagcttttacccctccattatctctttatttgttgccagcttatatggctagaagccagataatttagttctgcttcctgaattctctttaataaagcttctgttcaggagcaagtctgtgtgcagcaggcatgggggcacctgccttgtcacttagctgtgaccagcttacccaagccacagcttctgtctagggccccctctcatgtggctgattgcaggttagattgttaaagagggttagcacatagagatttgtttcctgaattgataacctttattacctggaaaacgataatagaaagatgatgtttgagttgtttactaaacttgtcttggtttccatgatgtttgttggctttctaactcatgtgaacacactagctgatcactgctctgccagcaatacagtgaccattctctactaaataaggggtgttgttgcgtcaattggatggtatgtaccagcaaatctgatagctctagtgaaaggaggattcataccattgtgtcattattagagtgttctgtaactgagaataaaacatttatttgattaagtgccatttactgtgcttccttttctagtcagtttctcatccacacagtctttggagccagatttaccatttaatgggacctaagtttttattggaagttttaaaaaaaattctttttttttcttttttgagacggagtcttgctctgtcgcccaggctggagtgcagtggtgtgatcttggctcactgcaacctccgcctcccgggttcaagcgattcttctgcctcagccgcctgagtagatgggattacaggtgcgcgccaccatgccaggctaatttttgtatttttagtgaagacggggtttcaccatgttggtcaggctggtctcgaactcctgacctcatgatccgccggcctttgaacactagaaaaaaactgagaagattgtttagtgcaacccacccagctactaactgggaaagacacttgaaccctctaggctttaaattaaatatctggaaaaatgaagcagttggaaaaaataattactaatatttttgggtctaaacttgtatcaccgtcttattttacaaaataaagaaatatttgcaaaattggaggcttgcttagttagtgggtttaatgagtaccagtggaatatattaaaagttaacattttaaagtggaaagattttaatattacttttttttttggttgtaagtcttgcttttcagggttgggtgactggggctattgtaatttggggcccttagccataggagctgccaaagggtacaaaagaattgcttcactgttaattttgctggacttttctaagggtaaacaaacttcctttgacatgtacaagtttccaaagctgtgctttcctcagggaaggtagttaaagctaaaagaagcaaagcttttagatttaattcagtgggtgaacatgaaagccatgcataaatcttagaagaactatgctttgctgagaggcaaagaattgtctctacactctgatgcggggatatgcaggaggagcccaggaggtccctgtgagggtgcaaaccaattaagtaagtcttgaaccgaaattgctttttatcatctgggtgagaagccacagatttaaagaaaagggctattgttttacaaagacctaattagctgggctacactcaagctcttgggtttttatcttattagagaaaggaaaggttgaaattgcttatgggctacttcctgggttggaattcctaggaatttaggatttctgaatccttttctaaggaatacagaattcttcctgaagccatgtgtatcggactaactatattttccgttgagactcaaactaaaaatgcaattgctctgatctactagaagtttgtcctaaatatcttccttactacaggcgtgctagtataagtatgctttagccttcttgagtacacagactttggagtaaataacatgtgggtttaaaactcagctgtgtaaaatctcagctgtacaccaagtggctctttgctttgaagcaagttacttgagcttatatataaaatagggtatctacaggagtattgagagtattaaataaaatttagtgacatagttagtgtctcaagggacctgaaagggcttctaactcttacatggtgtaatgttttaaaatgtggcactttcagtgtgacaatgttttataataaatatgaattgcactaattcttctttgttgaaaacaaacaggcaagcaacaaaaatgtggctacatagagacagagagagagagagagagagagagagagaaactctcacagtttatgcgagagtcacagttatgtgggaaaacttaactaagaagacttttccttattctttaggagcatcaaaaaatggcaccgagtccaaaccttggctcatggattgaaatctataatgtgccatactgactgagtgcctggggcaagttcttcaacttctctgcctcagtttcctcttctacaaattgtgaagatagtagtacctctagggtggttgtgaaaatgaaagggaaataaaggatgttaaagaaagtatccagcatgtactgagagcccagtaaaagttagtgatcaccattacctccactactgtattaaattgctgagcattcaattttaaaaataggaaggaagagctttagtgcagtagtgtttgacagatttaggatacaatatctttccttaaagtaaatttatttcattattttttagcatctaattattgccctttgatttgataaagagatatagatggtttgtcccacgagaacagttctaagctacactttttgacatgttaatcttctgtgtgaaggctggacttcattatttctagagtgttcctgaacaaggcagatcagagctttaatttttggaatgttaacaagggcagctgtataccagagttctagttgtttttatgagatttttaaagaagcacagaaaggaaactagtgaaaaaaaagtttatagactctggtttgaatccaaatcctttcagaagtgttctcttcatattagatggcaataaaattagtcatttaaatactcaaatgtgtgcttttataatttataattgtattcttagattttttttgcaattatttcgtatctttgatttggaaaacatttttaaggcatgagataaatgttttttgtataaatgaaaaaaattaagctgggtgtgcatgcacctgtattctcggctacttgagaggatgaggcgagatggagtgcaggagtttgagtccagcctgggtaacatagcaagactctctctcttaaaaaaaaaatgaaatgaaagccatttattctagaggattcaggaaactccagagtttgaattttcctataaatgcagtctttatccataaaatatgttgtgcacccttagtgatgaagtaaagtatttgaaatctattaaatgctttgccattttataatttattctaagctatgcttatgtttctgtgtagaacaaaggattaggaaactaacttatttctttcccccaagcatgctgtatttttttctttgaaaaaatgatttctaagatattttaatttaagttatagtcagtgtgactatagtcagtgtgatatttaattttaagttatagtcggtgtgattataaatatgaaaatctgaagagtcaatagagaaaaagactaggagaaatagtggctatgtatgggtagtagagatgttggtaatttatttatctttcaaacattcttattaaaaaattttaataattatgtattactcctaaatttagaagtcagtttctaattcgatgtaagatgcaataaattcaaagattagatttcagcattatttaaaaaattacaaaatattggtttttggaaattcttacataattttgtagaaaacatctaactttagagtatcttttttttttttttttttttttttttgagacggagtctcgctctgtcacccaggctggagtgcagtggcgcgatctcggctcactgcaagctccgcctcccgggttcacgccattctcctgcctcagcctccctagtagccgggactgcaggcgccagccaccacgcccggctaattttttgtatttttagtagagacggggttgcaccgtgttagccaggatagtctcgatctcctgacctcgtgatcctcccgcctcggcctcccaaagtgctgggattacaggcgtgagccaccgcgcccggcctagagtgtctttattattatttttttgatgtagtgatgactaaccagtcaattccattttgtgtattgtgaggacaataatgaaatgtttgtgaactaaagaaggtaaaaaattagaagataaaatactattattcaaagaattactaagagataaaagatgatacagtcaggaatttctgagaggcttacatttgggtgggaatacatgcaaccaaaaaattgtctaaatgtagaggtcacagaaagaataaagagattaggtagggtgttatagagaagagccaaaaattttttgtagaaggaagaaaacagttcaaaataacacggaaagaccaaaataagggttctggttaatgcatgaataaaatttattcatttagcattcaaaaaagagtttgttccattgattctcagtgccatctcttatcactatgacattatgacattttggaaaagactagtaacattttcactaaatggtaaggatttttatttttattttttgagacggagtctcgctctgttgcccaggctggagtgcaatggcatgatctcagctctatgcaatctccgcctcccaagttcaagcgattcttctgcctcagcttcccgagtagctgggattacaggcgtctgccaacatgcccagctaatttttgtatgtttagtagagatggggtttcatcatgctgaccaggctggtctcgaactaccgacctcaggcgatatgcccaccccggcctcccaaagtgctgggattacaggcgtcagccccggcgcccggccggtaaggatttttaaagtattttaaaaaaacgtttacttggtcaaaggtgattcattagctcatactatgttttgatataatataaaagcaacgaagtgctatgatgatggcactttgagtggctgttaagagtagaaaccagccgggcgcggtggctcaagcctgtaatactagcactttgggaggccgaggcgggcggatcacgaggtcaggagattgagaccatcctggctaacacgttgaaaccccgtctctactaaaaatacaaaaaattagctgggcgtggtggtgggcgcctgtagctccagctacttgggaggctgaggcaggagaatggcgtgaacccaggaggcggagcttgcagtgagccgagatcgcgccactgcattccagcctgggcgacagagcgagactccatctcaaaaaaaaaaaaaaaaaaaaaaaaaaaaaaaaaaaaaaaggagtagaaaccagagattcattggtcttagaaatagcattagtgcaacatgtggattatgtgtactctcatctacccaatggtatgagcacttcatctgctgtcaaagtaatggagaaaactctggtttagcattagaaatcaccatcttctctagtacaagtcatgaaacttaatgtcggcagttttaaaaactgcagtaaagaaattcaccttctcaccttttattttatcacataactttttgaaagctctgttattataattacagtgaattttggtttatataataccaacctcacaaatgcagaaattctcaatgataatgtttatggttttaaaatgtttattcaggttttaaagacttcttcttttaaaaagatttctgagtatatgaaaagtattactatgccatataaaaaaagatttattttaataatctcactctacttactgccagttttatccagaaaaatagatgaataaactgcttacaaaacagttagggaaaacaacatgtggtgtggaggtatggaggtagggaacatggtgagtcacatgaatgaaattttgctgcagttagaatttataaaagatgtgctgatagaaattactgtatctaatctaattatataaccattagaaaaatgtaaatattcttatatacctgagatttatctccagccatatatacttgaaaattaaagatggataaatttcatacatttctgtgcagctttataaagatctatttttggtaaggatggtctactaggttttttatgtatttattccaaaaattcattgctctaagttttaaagaaattaagtcctctgtttttttctgtagcaatgtgagtttcaatttttaaacaatgttttgtgtgaaataaagatttgttacacacacacacacacagccttacttcaccactttggtggctcactgtgctacatgtatgcagcattctgttttaataagagtcagcactactgtttttcttaaacacacagcagctatagctatcttttcggctgaggtgcagcatacagtgcagcaaaggaaaatatcttttggagtacagaatactcttaattatcagttactgggcatctactttgtgactgtaatttatgtcctcctatctcctgcaaatcctagacaagaaaaaaatccttaaatcaacatgatacaatgggtgctgcttatcaactgctaggtaagaacatcaaaatctggatcacagtagaggttatagtgaggccaagaccttagtcaacatatgggaaggaaccacttatgtgagagtatataatgacaataaagtgagtgagtgactaaacccacactatgtaataaaaataacatgaagttgagcactcttcaggtaccttaaacatagttatattttcataacaaactaaaagacagcattgttcctttttattctttcattgtgagacttggttattgcagaaaaatgataaaacattaacaaaccacaaataagcaaaatgaagataatacagtttactaatcatgtaactacccagaaatgaaaagttaattaatcaatgttaacattggtataaactttttgtatgttttttctcgtgttatttttttttaaaggtagtattttgcaatgctactgatgtgaattttaaattttttcttagaagtgatttatgactgaagaaaaactctgtgttggtcctgctcggattctttttttccttttctctcataattccgcattgtctactgataatcttttgtggtgatgtattagtcttactctgtgtccgactagttatttccttgtatcaaatcttttaatataaattacagataaatctaagtttccaaaattacttcacatttacttttcatgtaatcaaaaattatttgtatttctataggtctatttcctagactcatgcagtgctctgtttctagtttcttcttgaatacactttaaaagttattatgtattgtctgtaaggcaattctttctgctttcataattacctttttttttgaggtcttacatttttttttccttgaactctacctgcctatgttttatctgcattgaaagtattttcttatcttccctaaacacttgtttttctaccttgtgctcttattttataaaggctattgctttttaaacttttaaaagaattatattaagatgtttgatcagatttttgtctgttctctggtagcatttttctggtgaatactcttcacttgtcatttatgccttatgttttttcctcctattcttttagtattatgatttttgtataggttttgttttttttaaattgagatataatacacatataataaaattcaccactttaaagtgtataattcagtggtttttactgtattcacagagttgtacaaccaccattactatctattatgattttcatcatgctaaaaagaaactctgttagcagtaactcccctttcccccctactccctcatccctggcaatcattaatatactctttgcttctatggatttgcttattctgagcattttatagaaatcgaatcatacaatacatggccttttaagtctgttttttttttttcatttggcataatgttttctagatttatccatgttgtcatgtattattatttcatttctttttgtggctgaataatattccactgaatatagcacattttgtttattcatttattagttgacagatatttggattgttcccactttttgactattatgaagaatgttactataaatatttgtgtacaaattttcatgtggacataacattttcatttctcttggatgtatacctatgagtgtaattgctgggtcatgtagtaactctatgttttaccatttgaagaactgctagactgttttccaaagaggctataccattttacatttccatcagcataatatgagggctctaatttctccatatcctcgctaacatttgttattatctgacattttgattttatccaccctctctgtgtgaagtgatatatcattatgtttttgatttgcatttctttaatgacaaatgatgttgagcattttttcatgtgcttgtcaggtcatttttatgtattatttggataaatgtttgtcttagtctgtattgcaatgctataacagactaccacacactgggtatttataatgaacagaaatttatttggcacatagttccagagactaggaagtctaagagcatagtgtcagcatctggtggggccttcaaacttcatcaccttatggtggaaggtggaagggcaagagagtacatgagagagagcaagagacagacagagagcaaatgagccaaactcagttttataacaacccactctcacaataatgaattcactccagtgataaaaacattaatctgctcctgagggcagagccctcatggcctaatcacctcttaatggtctcacttctgaataccatcattatagcaattaaatttcaatgtaagctttggaggagatattcaaaccatagcaatgtctattcaaatttgttcctcatttgtttaaatttatttattttactgttattttaactctatatttgtttcatttaaaaaattagggtataattgacaaaatgaaaatgagatatatttacagtgtataatgtgatgttttgatatgtatatatacattgtaaatggttaaatcaagctaattaacatatccaatattgcccatttttaagttaaactatttgtatttttattatagaattatgagtttttatatattatggatactaaatctttatcagaaatatgatttacaaatattttatcccattctaagagttgtcttttcagtttcttttatttattctttttttttgagacagggtctcactctgtcacctaggctggagtgcagtggcaagatcatagctcactgcagtctccaatttctgggttcaagcaaccctcccgcttagttccctgggcagctggaactacaggtgtgtgccaccatgcccagctaatttaaaattttttattatttttgtagagacaaggtctcactgtgttgcccagaatggtctcaaactcctggccctaagtgatcttcctgccttggcctcccaaattgctgggattacaggcatgagccaccacacttgggctcaatttctttctttctttctttcttttttgacaggatctcactctgtcacccaaggtggagtgcagtggcatggtcttggctcactgcaacctccaccacctgggctcaagtgatcctcccacctcagccccgcaagttgctgggactacaagtgcatgccaccacacctggctaatatttgaggggaatttttagtagagatgggtttttgccatgttgcccaggctggtcttgaactcctgagctcaagtgatccacctgccttggtctcccaaagtattgggattacaggcttaagccaccacacctagctctcaatttcttaatagtatcttttgacatacaaatttttaatattaacaaagcccaatgtatttatttttcttttgttgcttgtgcttatgattattatgattattattttattatttgagacagattctcagtctatcacacaggcaagagggcagtggtgtgatctctgctcactgcaatttctgccgccttagttgaagtgattctcatgcctcagcctcctaagtagctgggactacagtcatgtgccaccatgcctggctaatttttgtatttttagtagagacagggtttcaacatgtttgcgagctcatcttgaactcctggactgaagtgatccacccaccttggcctcccgaagtgctgggattacagccactgtacctggcatattattattttgtttgtttttgtttgtttgtttgttttcttgagacagagtcttgctctgtcacccaggctggagtgcagtggcgagttctgggttcactgcaacctccacctcctgggttcaaatgattctcctgcctcagcttccctagtagctgggactacaggtgcccgccaccacacccggctaatttttgtatttagagatggggcttcactatgttagccagactggtcttgaactcctgacctcaagtgatcagcctacttcggcctcccaaagtgctgggattacaggcatgagccacctcacctggccatattattttttaataataaaaaattattctgcagtcatctacaatgcttgcacctttggtgtcatatctaagaaacccttgcctagttcaggccatgaagttatacctacgtttttgtttaagagttttatagtgttagtcattacatttaggtctttgattcattttccactttaagttaattttccatatggtatgagggagggatccaaattcacttttttgcatgtggatattcagttgtcccaacactattccttggaaagattgtatttacccagtgaatgctcttgaaattttttattgaaaatcaagtgaccatagacacatgagtttatttctggacactattccacttatctacatgtttatccatgcctgtagtatcacactgtcctgtagtaagtttgaaatcaggaagtgtggttctccaaccttgttctttgttcttctttttcaagattattttagctattctaggtcccttacaattctatgtaaattttaaggatcagcttgtccatttcagcaaaagaggcactggaattttgatagtgtactgaatttgtagatcactttgggtagtattgccaatacaatatgaagtcttccaatacataaacatggactatctttccatttatttaggtcctcattgatttctttcaacagtattgtgcagttttcagtgtacttctttaaaatttattcctaatttaaatatttaataaaataatcaaataaaaatatttgattgcgtttgatgctatcacaaatggaatagttttattaatttccattttgggttgtttactgcaaagtgtttaagaataggactgatatttgtatattgatcttatatactgcaaacttgctcaatttattagcttttagtttttttttttttgtgagatggagtcttgctctgttgctcaagctggagtgcagtggcaccatctcgtctcactgcaatctccgtctcctgggttcaagcaattctcctgcctcagcctcccaagaggctgggactataggcgcacgccgctatgcccagataattttttgtattttagtagagatggggtttcaccatgttgcccaggctggtcgtgaacttccttagctcaggcaatccgcctgccttggcctcccaaagtgctgagattacaggcatgagccaccacgcctggccttagtttttattttttaaagttggattctttagagttttctctgtaaaaaattgtgttatttgcaaataaagatagatttctttcttcttttccaatctgaatgccttttatttctttctcttgccaaattgccattgctagagcctccagtacaaagtttaaaagtagtggtgagagcagaccttcttttctcttttttgaaaacgttcaggctttcaccattaagtatgatgttagttgtgggttttccatagatgctctttatcaagttcaggaatttccttgctattcctagcttattgaatgtttttactaagaaagggtgttagattttgttaaatatctttctgtatctgttgagatgattatgtagtttttgtttttattctgttgatatggcatattacattaattgatttctgtatataaactgaccttgtattcctgagatagactccactcggttgtgatatagaatcctttatatgtactactggatttggtttgctagtattttattgagggtttttgcatctgtattttttttttttttttcgagacagaggtctcattctattacccagcctggagtgcagaggtgcaattgtagctcactgtagccttgacctcccgggctcaagggatcctcctgccttagcttccttagtaactgggaccacaggtggacaccaccatgccccggctaatttttaaatttcttttgtagagactgggtcttgctacgttgcctaggctggtctcaatctcctgggctcaagcgatcctcctgccttggcttcctaaagtgcttagagtataggtgtcagccaccgtgtccagtcttgcatctgtattttttttttttttgagacagagttttgctcttgttgcccaggctggagtgcaatggcatgatctcggctcaccacagcctctgcctcctgggttcaagcgattctcccgcctcagcctcccgagtagctgtgattacaggcatgcgccatcacgcctggctaattttgtatttttaatagagacgaggtttctccatgttggtcaggctggtctcgaacccccaacctcaggtgatccacccaccttggcctcccaaagtgctgggattacaggcatgagccaccacacctggtgcatctgtattcttaagggatattcttctttagttttattttcttgtaattctttgttatgctttcagtatcggtgatacagacatcacagagtgagtttgggagtgttccctcctcttctattttttgggagagtttctcaagaattggtgttttatcttatttaagcatttggcagaatttaccagtgaagccatctggtcatgggcttttctttctgtgaaaaaaattttttttttaattactgaatcaacttctttagttgttatgcatgtattcagattttctatttcttcttttattattttggttgattgtatctttctaggaatttttctatttaatctgagttatctcatttgttggaatgcagttgttcatagtgtttacttataatccatttttatgccttgtgagattggtagtaatatttagtctttcatttccaatttgagtaatttgaattttctctcttttttcttgattgatctaaaataaaattttgttaatttgttgactttttcaaataatcaacttttggttttgttgatttaagaaaattctctatttagtttatttctgccctaatatttattatttccttccttctgcttgctttgggcttaggtcgctctcctttttctatttttataagttgaaatgttaggttattgacctaagatctttttttgtttataaaataggcatttaccattataggtgtcccctgctttcactgcatttcttaagttttagtatgtcgtattttcattttatctcaaaatattatgtaatgtcccttatgacttattctttgacccattggttattagaagtattttgtttaatttccacttatttttaattttccaaatttccttctgttatgggtttctttttctttcttttttttttttttgagatggagtcccgctctgttgcccaggctggagtgcagtggcgtgatcttggctcactgcaagctccgcctcccgggttcacaccattctcctgcctcagcctcccgagtagctgggactacaggcacccgccaccacgcttggctatttttttttttttttgtatttttggtagagacggggtttcaccgtgttagccaggatggtcttgatctcgacctcgtgatccgcctgcctcagcctcccaaagtgctgggattacaggcgtgagccaccatgcccggcccctgttattggtttctaaagttattccactttggtgagagaatatactgtgtatgatttcattccttttaaatttattaaagcttgctttgtggaataatatgtgattgatcctggagaatgttccatgtgtgaaagtgatttaataaataaacatttgagaaagtttccagctttaattttgaagatggtaaatattgatagatacaattcacacacacaaaagctcttggggttctctttttttttttttttttttgagtcagagtctcgcactgtctcccaagctggagttcaatggcgccatctcggctcactgcaacctccgcctcctgggttcaagcgattctcctgcctcagcctcctgagtagctgggattacaggcgcctgccaccatgcctggctaattttttgtatttttagtagagacggggtttcaccatgttggtcaggctggtgtcgaactcatgacctcaggtaatccgatcgcctcagcctcccaaagtgctgggattacaggcgtgagccactgcaactggcccacacttttaaaaattattaagccaaggcgggcagattacgtgaggtcaggtgtttgagaccagcctgaccaacatggtgaaaccccatctccactgaaaatacaaaaaattagctgggtgtgctggcaggcgcctgtaatcccagctacttgggaggctgaggcaggagaatcgcttgaatgtggaaggcggaggttgcagtgagccaagatcgcaccactgcactccagctgggtgcgacagaggaagacgccatctcaaaaaaaaaaaaaaaaaaaaaaagtgtgaatagctcctaacaccaaaatgtttgataaccactgacctaaaggaatggtgggaaatgactctggataaaaattcaactcagaaatgtttgcttggtgaatgaatatgaattttcttctgtaatcagtgggaaatcaatggaggtttttagaaggaattagtaattatatcgattgcatccccggggcgtagagcaattccttgtacttagtagctcagcaaatatttgtcggatggtagtcagaagtatggactgagaaactgagagactagctgtggaaacacttgtttgtttttagaattctaggcaaaaatgcttagatgaatgaaggccattctgagaaattatgtaccaattccctaattacttttttttttttttttgagactgagtctggctctgttgcccaggcgatcttggctcactgtaacctccgcctcctgggttcaagtgattgttgtgcctcagcctcctcagtagctgggattacaggtgggcgccaccatgcccaaggtttttgtagttttagtagagatgggttttgccatgttggccaggatggtctcaaactcctgacttcaagtggtccacccatctgggcctcccaaaatgttggcttataggcttgcaccactgcgctccgcctaattatgttttttgggacagggtcttgctctgtcacccaggctggagtgcagtggtgccatcatagctcactgcacccttgaactcctggttcaagtgatcctcctggcttagcctcttgagttgcttggactacaggcatgtgccaccatgacaggctaattacatttatttatttatttatttatttatttatttgtagagatgagaatcttactattttgtgcaggcagatcttgaactcctaccctcaagtgatcttcccacctcagcctcccaaagtgttgggattacaagtgtgagccaccacgcacagccccttattacctttaatttctgccgtaatcattacagcaaatgtgaaatatttcctggatatttctgtggatatttctggatatttgtgtgtgtgtggttttttgtttgtttgtttgttttaggagacagggtctcactcttccctcaggctggagtgcagtggtgtgctcatagctcactgcagcagcctcaaactcctgggctcaagcaatcttcccacttcagcctcccaagtagctgagaccagatgagcggatcaccctccctggctaatttttcttttttcttttttttttttttttagagacaaagtctcgccatgttttccaggctggtcttgaactcctggcctcaagtgattctcctaccttggcttcccaaactgctgggattatagatgtgagccaccacgtgtggtatatttcggattttttttttcaatagaacattcaatgtcttaccaacaatttaatgtgggttttgaatgaatataatcaatccgttttcaatgcttttattcagataagtttgtagtttgaacaaatagaaagtcaaacatatattctgagtacaaaacagcttcaagggattcactgcagcgataatcacagtatctcttctttaaaataggaaatcctgcttgggatttctacgtactttaaaatgttaatttaaatcaatgtaactttgcatatactgtgggaatattttgaggttacacagtggattccagcagaaagcagctggcacactcaaaataggataaattagggtgtttttatttatgtaggaagtatttacagaggtaaataaagagggtaggaaactgcggggatggaaaaagcaaaaaaaaagaagtatgtgtggaatgtagggcacaggtataggctctaactttgagataggatataccccttcctctgaccctacaggaaagtgttaaaaaacagatgtagagatggatatattgccatcaaaaggtgatggtaaggcatttgctgcttgtctgagactaggctagagctctttccctgattcttactgtttgcccaaggcctgttacctggtaagggagcgaatttatcctcatcttgcagccaaagaagaagtaatttttatcattgcaaggaaatattacacccaatccatgtgtcaggtctactattctaatattcattttcctgtgcacatcagataccacaaagtctaggttccaggatcactgaggtacccctgtctccattagtagagataatttgttgcactgatagataaaaagtacagtgtagctgtactgaaaatgacatggaactgctttctcaacccataatttttttctacccaacaatctcctctcccttcctctgagcagatgactttctcccccttaattgagataaataagaccttcagaacaaaactctattcctttctccccatcttcacctttccccctttagtttcagggattaggtgttcacctgggctctgcagttctcatttcattctttgtcgttgctattttactttatcatctatttcctctcccttctgtattttcaacctctttcccccattgcctcctattgctaagcctgtaagacgttttcatcctaaaatgtcaacaacaaccagaatgcccaccacaataattaaaggagaatgttctgctgtctgcacatcagttctattgcctactgcctttctctctctctcatgctctctctctttttgagatagcatcttacctgtcatccagcctagagtgctgtggtatgattatagctcactgcagcctcaaactgcagggctcaagtgatcctcacatctcagcctctcaaagtgctgggattacaggcatgagacacagcacctggccccttatctctcttttcttgctcagtcaagcttctttaaagtatgagctacaaaggataggatacagaattttcagagcccaggacaaatgaaaatgaatggttacttgttcaaaattattaagaatttcaagatggcaacctcagagtattaaacaactcatggggactggggccctatgtgactgcataggttgcccatcacaaagctgactcagaatctacacttctcttttttacttactgaactcccattccctcctcacccactgcaatttaccttttacctccatcttaatgctggaggtaaaacctccaccttggattctccacctagctaaaatcgttaaatatttttcagttcttatatttatctttttgcattaacctaatcttcccatatatttctatctcccatccataatcatggttgttaaaaaattacttgttgaatgaatgaatgaccaatctttgactcctgtttgttggattctcagggtcctgactatcttatcattttatgccatacatctaccctagttagtccctccaggtttacatgtaagcttgtgagtttgaaacctatatgtaaattgatgacttcaaactctctatctctagcttttcccctaactttagactcatctatctatctatctatctatctatctccttttgcctctgagaaatcttcatccggctgtccaattgatacctcaatctcagcatgttcaaaaccaaactcattaccatctcctacttgaagctttctctttctgttgtggttcttttatttgtttatttatttaatttattttttcatttttctttgagatggagttttgctcttgttgcccaggcctgagtgcagtggtgcaatctcagctcactgccacctccgcctcccaggttcaagcgattctcctgcctcagcctcccgagtagctgggattacaggcatgcgccaccacgcccagttaatttttgtatttttagtagaagggagtttcaccatgttgaccagactggtctcaaactcctgacctcaggtgatccacctgccttggcctcccaaagtgttgggattacaggcgtgagccactgtgcccagccctgactcttattaattttttgttttttagacggagtctcgctctgtcgcctaggctggagtgcagtggcgcgatctaggctcactacaagctccgcctctcgtgttcacgccattttcctgcctcagcctgtccgagtagctgggactacaggctcccgccaccacgcccggctaatttttttgtatttttagtagagacggggtttcaccgtggtctcgatctcctgacctcgtgatctgcccgcctcagcctcccaaaatgctgggattacaagcgtgagccactgcgcccggcccctgattcttatttttaatggtatatctaggcacaaaatgctaggaaggactcattgagggaggaatttatattttctaaccaatgtaaggagctcaggaaaaatatcaaatttgaaattgaacttcaaagttgaataaacttggaaagataaaaatgagatggaagttgcatgtaagatgaacaaaacaaaacaaaacaaaacaaaaaacaaaaaactagggatgggttggagtaaaaggattcccagctcttggtacattattctcatgtgagtccccccaccaacattgagtggggatcacttgtgaacctacaggatattgctgaaataatgaagtttgacttctgaggttcagtcataaatgatattgtggcttctatcctgttctcttggaccactagctctggagccagctgccgtggtgtatgacctgcacacagctctatggagaagtctatgtgttgaggaactgaggcttctagaaaacagcccatgtgagtggcccattttagatgcagatcatctatcccaggcaagccttcagatacttgtagtcttggcctatgtgttgattcctgacccaatacagaaccacccagccaagccactcctgaatccctcatccacagaaaccgtgaaataataaatgtttgggtttctaagccattatgttttgggataatttattatatagtaatagataactaatgcagagggtttttcgttagatacatttttatatgtattgagttttggaaccgtatatctatagtttgaacagtataactaaaagcaaccacaaagggaactctgaaaataaaatcctttcctaaattctgcattgatttcccattacagtcttatttagaattaaataagaatactttgcacttatctacccagtgtctatgtgatctggcccctgcttccttcttctgtgtctccagccaggagacattaatgttggtttcccttgacttccatcaatggtctgacatttctgaattccaggaatgacaaagattatgtactcgaagcaaaactctagctgcacaccataaagcagctcttcagcaaaagtgatatggcctttatgtttttaacccagtaggacacagacactcacacacacacacactctctctctctcacacacacacacacacatatactctcttacagctttatagaggtaaaaagtaaacagtatatatttaacatatgtactttgacaaatttaaaatgaaatttgaaaccatcaatatgctcaaaggaatgaacacatcttttatgcttaaaagtttcctccaagcccttttgtaatctctccttccccctcacctcatcccaaactagttatctagacagattatagaatatttccatcgttacagaaaatttattggaaagggcttatgtaattcttgtaaagaatacctcattttgtttgattgtagctaatataccagttgttacaaagtcaatgagtattggaactagtagtacctgcgaacacttctatctattgacagttactgatgacataacttttgagttttagagctctttctgctggatcagctgaggtatgtcaagttcataccattgtgcagagtgtgaaatgccaatagtaaagcatcctcttcctctaggaaactaattagagaagttagctccagagattaaaagaaagattcatagtctttgattgaggtagaggaaaaacaaaaaaacccaaacttgctccttccatttaattagcagatggaagtgtgtccagaaattcttctgtgtcctctgatccttttttccttttcttcttttctctgtttgattatttagaccaggggttggtaacttccttataaatccctcagagatgaatggaattaggaaaggtctcgtctggtctctttcaccttcacttggagtcctagagtgagaggaaaatgggataatagagtctcttcctagacaatccctcaattgcttgtttcttgttacagaagtttattgttaaaattacatgtacagataagctaaaagaagaaagtaaaaatgatgactatgcttcttacatagaaataactgcttaatattgtagtctaaactgaattctcactctcttttataaaaatgaaaatatactacacattttagtacttatgttactataaaataaacatatattatcaagtatcttctatagaacaatttaaaataactagtgggctgggtgtggtggctcatgcctgtaattccagcactttgggatgccaaggcgggcagatcacttgagctcaggagttggagaccagcctgggcaacatggtaaaaccccgtctctaccaaaaatataaaaattagccaggcatggtggcatgtgcctgtggtcccagctacttgggaggcagactgggagatcgcttgagcccaggaggtggaggttgcagtgagctgagattgtgccactgcactcctgcctgggcaacagagagagaccctgtctcaaacaaacaaaaaactaatggaattgtatactgttgtttagctgtgtcagctgctagatattcaaagtcctttttttctagaagctttgatccttgatttttttttaaagacacatttattcagcatcatgatcagactattacatttagcaatcaacagcatgggtgcaataaaaaatgtacattaaaactctttgttggaatgctttacactttccacagaacagaagctaaaatacaattagtcacaaacacagttctcgagttttttgcccatacacacgagccactgcctcagtcagtgatgatttccatcacttcgattattcaaactgttcaaaataaacttttagttgatgttcttcagtgtcttctttaatgccaccaacaaatatctttttcacagttaagtgggcaccgggtttttgagaatattctcttgagaccgctctctttggttccacaactctcccatccaccttgtgtggctttgcattcacggctgccatctacctcctccacagtggcatacgtgacaaacccagagcccccggagtgcttggtgcttgcatgtctacttaccacacaatctgtgagccttctccactgctcagaagggctcctcaggctctcatcggttgtttcaaagctcagccctcccatgaagagcttccgcagctgttccggctctttaggacaggacggccctgggaagagagactttaacgaggcttcctcagcggtatccacgggcagaaagcagcccttgatttttttttaatagtcttgtatttaaggacaaatatagataagtaattcctagcaatgttagagtcaagattgccagtttacaaaaggaggaaaattaagtgcctctgaagttgctgaaatatttagctgggaggggtggcacaagccagatactcgggaggctaaggtgggaggattgcttgatctcagagtttcagttcagcccgggcaacatagagacatagtctcttaaaaaaaaatattactagtttaagatgcattttttttattttgaattctgaatgatgtttactaacttggaatggatggaaacctaatctgggggtgggaatgtgccagctgttcaatgattcagaaaaataagaatgttggttcaggatcagaatcaaaggatgccgtatttaattgaaactttgggaaaatttatgtaggcaaaatgaattatccaaattaaaattaagccaaaacgccaggtttaatgcattaataatagaattttttttttttaaaatgaagcaaaaaacctaggttctgttgattttgtcacttaccgtaggcagataatatttaatgtagttttaggaaccctgagaataggaagaatatttctggataaattccaaaaaaagaaacacaccagtgtcttgtacaaaggatgaaagcctttattagcttgtaacaaaatacattggagtgcacactatgtcaccaggctggactggcctatacctcctatcccctggagaagaaactgaatggctgcaatgtgctccgtgtggctactggacactttctggtttacttggttagtcttttttttttttttttttttttttttttttttttttttgagatggagtttcactcttttgcccaggctggagtgcagtggtgcgatcttggctcactgcaacctccgtctccctggttcaagcgattctcctgcctcagcctcctgagtagctgggattataggcacccaccactacacctgtctaatttttgtatttttagtagagatgaggttttgccatgttggccaggctggtctcgaacgcctgacctcaagtgatccacccacattggcctcccaaagtgctgggattacaggcatgagccaccgcacccggcctgcttgatcagtcttgttccaacctgcggagttgcatgtacagataggttatgatcatgtgtgctgcttttcatttgcatttatgattataattatgcaatttaattaaatattatatgagcagatgaaacatatttgaaaacaaaagttattctttctatgaaaaatggaatgtttagtaaaaacgataaaagtgaatcagggtgggccagaaaactgtaacgagattagaaagaaattcatcgaaatctttaaggaatctgtattcatactgcctacatttagcttgacatttcccttgacttttttcccctctccactttaaaaaagctaaaatttggaatagactatccattggagatgtgggttttgcaaggaagaggacttagaactccatattgcagtcatgcaatcagagaaaggctgttggcctttactcatgaatgaaatggtaaataaatacactttaaatcaaagtaaaatgtttacattataaatatatataaaaatatcattcattcatatatatatgtatatatatgtatatatatgtgtatatatatatataaaatgattctcaattctttttcacctgggcctgattgctctagataaggaatgtgagcttatactatgaatatttttaaatagagatttaaacaattaataaggcttcagccaaatttggtctcatagcacaaattcctctgagtgactatgaaaatatgacttagatcaatcaatacttttgataagtaattatgagaaacttgagattgtgataaaagattttcaaataagtgatagatgacaaaataaatttgtatctttaaaatttttctgtagttttgttatccccaaaatgaaacaaactggcctacattgatttaaattattctactttttggcctgtgggtaatagaatagatcaggagtttgattatttagagtaggcgacttttttggtaaagggctaggtaggaaatatttttggttttgtggatcttgtggttgttactcaactgtgctcttgtagctaaagcacccatagacaatatgcaaacaaatcagaatggttgtgttccaataaaacttttttatgggtgttaaaatttgaatttcatatcattttcatatgtcatgaaatattatcctcctttagtttttttttcagacattaaaaagtataaaatccattcttagctcatagtctgtcctctgtccaaaaatatgtggaaggctgcacttggcctgctgaccattgtttctctcccctgctctagcctcattctagctctccagcactgcctttctcacgaccctataatctagctgcttttagtgtcacagaaacacagtgtgttcacatttgcttacatatattttgcttatattttttcctgctgggaacactttctgttctgttttctaatccaaaaatcagcttaatgtttctgtctttcatgataattttcacagcttcactagccctcaggtgtgtccctcacctccaaattccctttagcacctttgatcttttttcatatgattagtgtgaattcgtcttttattatttcagatatgtgagctttgattcttcttttgattataacttattagaacagaagccatgtattatacttcctcttatttctctcagcatagcgctgggcacatagaagtattaacactagattgacatgtttgctatcaaaatacaatatatattattcttttattaagttttaaagcatttttatgtgggtttttggtctcaatacttgccctttttttctctgtcttcacttaatctttccccactgacttccttccctgtccgtaatcacgctcaactctttatttaaaaattaaataagcagggccgggcgtggtggttcacgcctgtaatcccagcactttgggaggctgaggcgggtggatcacgaggtcaggagttcgagaccagcctggccaacatgttgaaaccctgtctctactaaaaatataaaaattagctgggtgtggaggcacgcgcctgtaatcccagttactcgggaggctgaggcaggagaatcgcttgaacccgggaagccgaggttgcagtgagccgagatcatgccattgcactccatcctgggcaacagggcaagactccatcaaaaaaaaaaaaaaaattagccgggcatggtggctcacgcctgtaatcccagcactttgggaggcggaggtgggcagatcacgaggtcaggagattgacaccatcctggctaacatggtgaaaccccgtctctgctaaaaatacaaaaaaattagccgggcgtggtggcgggcacctgtagtcccagctactcggaaggctgtgggaggagaatggcgtgaacctgggagacagagcttgcagtgagcccagatcgcaccactgcactccagcctgggggacagagcaagactctgtctcaaaaaaaaaaaaaaaaaaaaaaaaaaaaattaaataagcagcgcaaccttccattgacattgatactcatctattccttaccaagtttttctctgagatggtattttttgaacatctaaaaggaagatatatacatgaggtaagcccttgcttctgtctgggaacagttttctgccctggcacatggaagtggagcctctgcagagctcagtctcactgggctggctgaggaggcagggattagagtttgagtatgctgaggcagctggaatttgcaaggcgggtctttagagaggatggcagtcacagaagtctgtctggggacttgctgctcaacatcatttgccaaaagctgatctgcacgtgtataggtcaagactccatgaggcctaggagaaattgccagcagcagggctgagggctgaatggtgatacagaggttttactgtgctgggagatgttcaagttctggctcagctagaatataaataccacattaggtaccttaagtgttctgttgagacaccaaaaaggccgcactccagagtaagctatgccctaagtctaagttcaagacaaatagactgggtgggtgtggtggctcactcctgtaatcccaggacttagggaggccgaggcgggcagatcacgaggtcaggagttcgagaccagcctgaccaacatggtgaaactcgtctctattaaaaatacaaaaatcagctcggtgtggtggcgcgcgcctgtaattccagctactcaggaagctgaggcaggagaatcgcttgaacctgggaagtggaagttgcagtgagccaagatagcgccactgcactccagcttgggcgacagagcgagactctgtctcaaaacaaacaaacaaacagacaaaaaacaaatagactttccctaaaaaagaatgtaaaattgatccggatggagccaaagtgatctaccaataatttaactgccttccagaaaaaaagctcaacacactttaaaggaagaccacatagtccagaatctctaccatgttcaccatatgataaaaaaaattactaatcatgtgaagaagtggaatgagacctacaatcacaaaaaaatgcagtcaatagaaacagaaactgagatgacctagatgttgccatcccacagaaacctgtaatgcgttctcccaattttttgctaatatttaacacattcgtcaagatcttattcaaatggtaggtttttttcaagaggcttccctgaattcctccaatatgaaataatttatttctcttttgacttctcactggtttatgtctctcctgtgatacctaattatattatagtcatctgcgtacttattttctttccttggctgaggccaaggatttgtattttctcatctttttagttactgatgtatttagccaccaaagtcatgtacagatggtccccaacttacaatgctttgacttacaatttttcaactttacaatgatgtgaaagctagacggattcagtagaaaactacttcaaattttaaattttgatgtttccccaactgtaggctaatgtaagtgttctgagttctgagcacgtttgagattggcaaggctaagctacgctgtttggtaggttaggtgtattaagtgcatttttgacttatggtactttcagtttatgatgtgtttatcagcacatagtttcattgtaacttgaggagcatctgtagtaagcactcaataattatttttgaatatatgaataaaagatatgtgtttcatatttccctgttgttttaaaaccatatacactcttcaatttttgtatttactcatgtgcagataggtatgagtgaaaaatccatcttaatgttagtttaaattatgagttttcatagaggtttccatgaattagcagactaaagagattggtcttctttcctgttgtacaaataaaaaaaaaagcagttggttattgtttttattccagaatattaaatataaatttatttgtgtctatcttcactagactgtaaggtccatgaggccagagacatggtttaatatccccagtattttccattcttgacacatagtaaatacttaataagtacttattaaatgtcttacattgactggtatttggccaagttttgataaatattttaccatttcatgataatttattttaagccattttgagtgtttcaagaaaagcctgcagagttttaaaataatttttctcagatatcatagctgtactataaggcctattaattatattttaacaaaagctagataggtagtgttttcctttacttgttaattttttaaagatggttttagctgttcattttattgctatttatatatatcatattgacagtatttataagctttctttgacaacaattcataagttaaaaaaagtcagtttgtggaggcttgtctagctatatagaaagtggaaatggttaatagaatgtttaatgtcatcatatttcaaagttagagattatctaatcactataccctatgaaaaatgacttctagaaagttaaagtgagctgttcacaaagtcagaacacgctcatattttgtataactactacaaccttttaaaaacaaaaatatatgaggaagatattttttgtattctgaaaataacaagggtttgcatattaagatataatcaatatgaaaacatctctacttctggcaagttttaacatggtaaagagcttgaaacagctctgaatttttttttttgaaaatttttaattttgatattttcttttgactctacatagagagagtcatgtccgttttataaccttccactctccccctgtctaccccaaaagaaacaacctagcaatgctcaaaatgacaaatccagcctttgtttcaccagattatttcaatctggcactggcactaccactagcttggtctgattatagttaatccactgcctacaacatgacaaatgtttttggtccaagttgaatggcgaagtcttttcaaacagggaaagcagttgtcagctgtccttgttgtggtaccaacatgtatcatgtcaggacagccaaacaaagaagaggatgattcagaatgctgacccgagtacacagaaccttgttaactctggtgggttttctgcaaggcttgttaatagtgatagaaaaaagaaatcatagcacaaaccccatattatattggttgccttagactgtatacacttatcaactaatatcaaatgcaattacaaaactgtgaattataatttctagtttctctataaatgacacatttctccttaaaaatctcaatttatttaagattttcttaaacatttctcctctagtttgttaagcttgtttagtagaaacaataccacttacagtacttgaattttatgagtgctatagctgttggggtcactcattcaaaaaaaaaaaaacaaaaccttaaattctcttggtgtgcttaccattcatcttttcttttatgggagatattgcccttttttctctttggggtgagtgatgcatgatgttgtttctgcaatgggcagaatactatagactattatatacacttatggatgtatgctctacatggcctatgctcatccttctgactacaagctagctcattaattctgcagagaggtatactccatagacaagaataaacattttctccactttattttagatgactcactttttttgatgcttttttaaaaatttagatttttctatttttttccttgttcttttttttttgactgggttcctaattattttcttaaaaaatgtgaattatttctactttacaaattaatgtgagaaatgaaagtaaaacatgatactttctttattagtaaagcatgtcatgatccaataggtttgtgttgtaatttctccttgaaaagaactgagtttatggtctttacttcacatcccagctgttcgagaattgctaaatccatagggagttgcgtgagttatgtaattggcatgaattatttgagtttgaggaaacacaattaccacataatgttagccagtgctggatgaatctaaattcaaggactcagggttgcagaggtctgtgggaccgtgatgttttctttgttgagtgcagttgtaaatttatttcttctttttatagcttgtaagtaaaaaatacatcattcttcagcattttgcctcattaatgtctagcaaagacatgctatgaggagagactacttaaacaaaagatgaagtaaacaattaaacaggcttagggaatgtgaaactaataatgttggggcttataacattcagacccctccattctctttcacctctttttcttcctttaaaaacactgtgaggaggtacgaacataacatttcttgccaaatatttttgttctttcacagtgggagaaagagaaagagaaagagctttctttatgtactttgctgctctgagatttcctttcctgttccctcaagatgagccttgaaacttggctcctcagtctttgaagtaccagattctagaataaaattaaatagtattcaagagcatggtgtggttctgctacttgaacctacatgttaggccacctacaacgatcagatatttgggctgtagaatattacatgtccttcaaagaatgcattctgaaatggatttgttttcctacataattcccaatgcaataactctgaagaataaagtttgtagcaggaatttatgatatacatttctgtggttttttttttttttttttttttttttttgagacggagtttcgctcttattgcccaggctggagtgcaatggcatgatctcagctcaccgcaacctccgcctcccaggttcaagctattctcctgcctcagcctccctagtagctgggattacaggcatgtgccaccatgccaggctaattttgtatttttagtagagacagggtttttccatgttggtcaggctggtctcgaactcctgacctcaggtgatctgcctgcctcagcctcccaaaatgctgggattacaggcgtgagccactacgcccggcctgtgatacacatttctattggctctgcaatgttaggtgctatccaaagactttttaatccttctaagaactccttttcatttacagtagaaaaatgatgtagtgtgcaggccaagggaaactgtgttccaaagaataactaatcatctatctttttgacagttttttatgttccaggtgtaaagttactgttccaggtattttcctgtgtaatgtcatttacttttcaccacaacactggatttggtgttttaaactctatttaatagatgagattgagactcagaggttttgtgacttgcctcgtgccacgtaactagcagtagcagatcctgtacttaaatcaagattcatgactcctcatcttccttttttgttcttccttcccatgcttcctttgtgtcccagtgaatgcatgatagaatttgtttatctgcttacaataaaatctacaaaattaataatcttgtgctattttctattccagccatgtcaagttatcaattattttttttattggagacagggtgacaatataatttatttttcaaaacaggatacttttgagagttaaaaggagtgctattaattatgcacggagaaagcaagcttatatcaaaattatccaaggcaaactagaatctataaatgccctcattatttaaaaagctagaggtaatatggcttagtagttagaagtagcagctctggaggcagagctaagttcaaatcctgattctactatttactagccatcttatatttgtcaaactgcctcaccactatgcctcagtttccctgtatataaaataaaaataatattattaataccatttaattgtattttaaatgaggttatacatgcatagcattaggaaagaggaaacccttgataagtattgtctattattacgcatggagaaagagtgatttctgtcattatgctttgagtggtatcaaaagacttgcctgaagataaatacagcttcatttctatagtcagtccttagaattaaagcatagttttctgaaagcgttacctaataagttctcaataaatatttactaaaggaatgaatgaataagttatcccagaggaataaaatgtgctagcatccatggttacaaggataatttgtatttcaaaaaagacataaaagtatagtggtgggctaggtaagttttgatgatagcagtgggtgggtgggaattggggtaggagaaatatttagcacctgatgatcctgggagggctgattcagatgggatatgggagttctaggtggctctgggccagtgaaacagttctggattccagggggaaggaagggatggaaatggaagaggccattacacaaatgctatctacacaaaaattttattggtgttatgtgctagaaaaggggaaatagccctgtcatgccaggaacatttgcccttggaattagactaactttattaagcttgggtaagtcccctgggcaagcagccccagctatttcattggtaaattatacatacatctaccttatagggctgttgtgaggattagaatgaagtaagtgtctgcatgtgtgtgtatgcatgtatataacatcctgcttattatagaaactcaacaaatgatagcttctataattattaaggatcgtaacaattacccaactcaaattttgaagaattttgaagtaaagtgtttgaaagctctttatgaatataaagtactttacaaagatatggacttgctatgaatgctgacattgtcctgtttaccagctctagaccttggatgtactgctattagaaaatagcgtgtttcatattcacatggtcagagttgtaaagattcagaatcagtgagactgatatgcatgctaagggtattgaagtgaaactttaaggcataattgttctttttgttcttgttattagtttatcctttttgaattctgagatcataggatatgggatattagtttgatgtctgcaaaaccaatcgaactccaagtattttgcttcttaagctgttgcttttaggatggcctttaggatgcgtagtgggtaaatcttcattcatttgcacattctaaaaatatatttttataagtcttttatatcccccaaatggttatttcaactatatttcagataaataggtttctaaagttgcttttatgttctcttaagaactcattctgatattctagctccaatcttataaacaatcctggaaatgttaacttcaattttctcagatgcaaaacgaagataacactactttatgtggttattgactagattaatatgataaagcatataaagtatttgggaaagtgcattatacctataagtgtgaatattattattattcccaacttcccaaacccaagagatcctctcacctcagcatcccaagtaggctgggaccacaggtgcatgccaccacacctggttaattttttaaaaaaatattttttcctaaagatgaggtttccctatgtttcctaggctggtctcaacctcctgagctcaagcaatcctcctaccgcagcctctcaaagtgctggaattacaggtgtgagccaccacacccagctagcaccttaaatcttaatttgctaatataattgtggtttttgacattacttttaatggcaaaactgcgactatttttgcaccaacctaatataaacaacttcaggacacactgtcataataatgaccatttatcaacctctgcatgttgtatacattctctattccataatggtcttgcaagattcttctcccctttttagagatgggggaaacctccacagagatatagttacttactcaaggtcatgcaggccaggtgcagtggctcacacctgtaatcccagctctttgggagctgaggcgggcagatcacttaaggtcaggagtttgagaccaacctggccaacaaggcaaaactctgtctctactaaaaacacaaaaaagtttgcccagcatggcggcatgcacctgtagtcccagctactggggaggctgaggcacgagaattgcttgaacccaggagacggaggatacagtgagccaagatggtgccactgcactccagcctgggcaacggagcaacactccgtttcaaaaaacaaaacaaaacaaaaggtcatacagacaggaaacgggaaaatgaagctgcaaacacaagcttgctgacccttgcccttgtgcagtttccacagtaccacatcaattcttcatctttaaactctgtgatgtcccatttcaaaatgccctagttggcttcttttaaaaaaaaaaatcaaattctctcatttcttgagcacttactatgggctaggcatgtaataggccctgtgatatggaagtgaatacaagcctggcttcctgtccttgagaaattcagtctagtggagaaggagagctccattcatttatataaatagaaggaatctctagttttttctttttaaggagattaaaattattgattgacataaaatttttgtatttggtgttacatacggatatgtagtatacatacatatatattatttttataatttgaaaactttcaaacttcaaattatgaaagtacaaatgaatgctgattatgttgctgttctatgtaagagttgacgataatggaaggttgtagatttagtaacacattattatgaggaactaaacatttatctgggtgtgctgtagaatgttccacaatttcctaaaagctgggtctagaaaacacggtaaaatgcaaatactcgaagatccatgaatccatgtcattttttattgggagcatggtgttatttgtattgtcactcctagaactcactgctccactttttccaccatcccctggctatttcagcttgattttataggagcagaaacaagagggaagtttgttatattttagctatgatttctttgagtcacatcaatgaaacatgctttagaacagcagagctcatagatatgacagggttgcaagatctgaaagccagatttgatgtacagtatttctttttttcccccacagtctttgactataactaataagtggtaaaattcccagtaatttgccaaatgcctgacagggttaatgaactggtgacatcaggatgctggtgcattagacacattttgtgcagaagttttgtaaagcctctcctgatggagatgcttagagatgaagcaccaatgtgctggtaaatggcctaagggtaacttagttatcctaaatagtcttaaacatattttcctaatggaaaattcttaatggaaatttttgttgtggtaagcattgaaccacttagagttgttgctctcatattccatttgtctgaaaactacagatggcaccaaaaaaccagacatattagcctaataccacagtggatgacatcaatatagtacttagggagaacttgatacactcaccataaagccttttaatcgtccctttcatagacttgggtaggcaagcctatttccaatttaaaagaaaaaataatcattcagagcaggatttgcaaaaggaattttcattcattagtgaccatcaggattattttccccaccaattttacaatcttttaggtgctgaacgccatggatttctcctcagagtggcagaaatttatcattatctgttctctggggagttaaatagattttttttaatgctccactgaggccacaattttgctattatgctcagatagccccagagcttgcagatgctggcacttctgtctttttttcagatgagtgatacaatcatgccaagaagccaaaggaacacttttaattcataagcaacttcattacatagtttggttacattgaaagtctgcctaacatcccacaaaatctgtcctcaaaccacagagtttattttcctgagtatttataaattccaaaatcaaaatcagaacaaaagcagctcaaaaatagtgttcttggttgacagtaatgtcagaaaactggtcaactctgagagtatgtgtcaaagcgagagcattcaaactgtctgtgattcagcgttgctgcattgtggcctctacattgccccaattgtgttgcatttgtgagtcaaactcattttgcctcagcatgctgcataatgaaagcatttgttctcattctctcaccacccgccaccctactgcttcagttccaggccattacacccaaagtctctgacagagaaaaaggagctcactttagaagacttggaagggtcagcaggattgctggacttggagcaaagctctgacttaatttatgtccattggttatttagagagagcttagctgtttgtactttgttttccagccataggaggaaggagctacagcatatgtcttcaaaagctgtttcttttgccatgtgtgatatagactatgggctataggttctgtttagagcatagtcgttcattcatcaggggcaaattctcaagtgtaaacatgaattactcctaccttcagtctgttgttaagccctttgctttatttaagcaagtaacaattctgagaggtaaaatctgtgcactggaaacaaaatagaaaccatttttaccagaacaaaaagagaagggagaaaaaaaggattgaggaatgcagcataaaacttctcagcttattgagatttccttttccttgtagaaaagacagataaatgtgtgagtgctggtaatgcttttctcaagtaaagaaagacacctttgatgtcgcattcctgacctcagatgctaaggaacgaggttaaagagcttttggtcaagtttttactgctgctatgtggctggtttggataaacactgtaaatgccaggctcaaactgcctgtttttttagctgtcatttctgctgtcaccaacctgagaacttcagggcttctccctttattcagccttggaaccacggccacagtcacttacttacctgctccttccagtgagccaccaccctcatagtgaagctgttctttaaagaccaaaccacttagctccagcgtgaggatgctcaacatatgaactacatacagatacgccaataaagtgaagcctctgtatgaaaggggacgataactcctcaatcatgaattcttttcttccattttccttgtccggcgcactctcccctctgcttcttttccagctggtgatctgacaagtcatatttctcttacagccgaggttagagaagctctttctctgagcttctctgataactgttcactgaggaagtggccaattctttaaattttcattcaggcaaaactaaaaccatggctctcttcaaacaccttgcatagctatagcttctggtcccccatgacagaagttgtttctctctcctgggttttcctgggagcctggggttctttgacccagtctgccaatattccctttctttgttcaatgccttttgttcatgtcttcatccttgttacttttttcattttccccttctccacaataggagttcaaatggaaaacatcatctgtctcaagcaaaagttatttgcatacatggttataaagaaaagcaactgattttctttaacctctcaggatcagcctctttattttttacatttcataagagtggtaagaggattgccgatcagaaattagttggccattaaaatttcctcatctgtgaaaatgaagggattaaaacagataatcttttaaggatctttctagccctaaaaatatccatggcactgatgatgttttgtctttttatgggggaggccagatggatgctcagctctccatgctgtgcatctgcttggtgagtggcttgaacatctgtttgggacctgtaataccaaggcattgcaattccccttgctcaccgtttcagctagcagcggcagaatgcctctccagaaggtgtcagcactcttgtctctggaagagctttttattcccattatttccaagaataataagaactagtttcctgtatatttcctttttgaggctgggagatctattttgtggtagtgaagaaaatatgcatattcttctcaaatatctcaaaaaaaccaggtttactatcaaatcaatattaatttatagaacataaactatagatcaaacaggtgagaaaatattttgacattttatcaaaggagaagccaaccatctttatcaatagactttattttttagaacattgtacgtttatagaaaaattgagcaaatagtacagagttctgggattatcctctccccttaatttcttctattattaacattttatattagcatggcatatttattgcaattaataataaattattattaaataaagttatcgtgttattattaactaaagtccatagtttattgagatttttaaagtttttaaccaaatgccccttttctcttctaggataccaaatttatatagtcgtgtcttattagtctcctcttggctgtaacagcttcatgggctttctttgttttttatgctcttgacaattttgaggagtactggttaagtatattgtgggatatccctttattgaaatgtgtctgatgattttctcataattagactggattacatgttttgatcacagaataaagtgccattttcatcacgttatatcaagagtagcactgtgaacatgacagtgctgttgatgtgaactctggtcacttggctgacagtgtttatatgatttctccactgaagccaaccatttttaaaccagtgttgactattccttcaaataaaaattctagattccatatttggaaattaatttaaaattaacttgagaaaagaccttgaaaataataaaaacaaatgaaagagttcattttcttctttctcctgtctaatgaacatagacgtaaataactaagctcatggcttactcagacctttttccaagagaaagaatttttttgtagttgacacagcaggagataaaaggggaggaagcagaggatggtatttttctctgggatgtgtcagctccatgaagaaattgctgccctacagacactgatccacgactgtcagttcagatatttcattctggctgagaggcagtgaaagaaatgaccaccgaggagggtatttccagcatttctaacacctcacttagggaagggaaaggcattacctaagccttgtgtgctgctttctagctcaactctaaccaagttgatgggggctgtgaagcctttcctgtgggtgtagtctcattgtttttatttaacaatgagtgaaagcaatagtacaaagacttgaatatctttatgcatattttaataataatgaaagttaggaaagtaacttctttaacagaatacagatgtgacattagtaattaggattccaaataccacatattggagttaagaaaaaaggagttccctttcaattaaactgattgcttaaatttgtgtatttacatattttcttagtgacatccaaaataattttaaactatttataattttctcattttgttagttgttatttacattattactaagatgaacatgcatatacaatttcttcttttttctccctctggccccataaaaacccaattttcttagccattagcattgatgagaggattctaaactagattttctctgtaggattgggtacaacgtaggcacctaacagaatgaactattttatgaatagtagaaataagttataagtagtatgagaattatattacttcttctgcatttctaatatccatcacatcttcagttttagtggtagtgtcttagttcccatcttcattttctctgcttttcatcaatccatccctgtagccagagcaaattttcaaatattaaacttaatcaaatcctttgtccatatctgcacaccatgatgactctggattgctgtcattagttttccatcctgcatcccctatatgattataagatctgtgagtgcaggaacagtgtctcattcacctttgaacaaccccctgcacactgtagactcaaaaaccacaggctgaatgaatgaatgaatgaatgatatagctattttgggaggtcatctctccatatagaccaaaattttggtgttgtttttgtattactggccacatttcatgaggctcttaaaaaagtcttctgtggaaattttcaaatatggaccaaagtaaggagaataatataaggtgtctcatgtatccacttagcttcaaaaatcgtcatcattttactaattttgttccatctgtcttccaccccacatttttttggtttcatttttctggagcattttaaagtgaacaccagacattatgtcattttacctgtgaatgttttattatgctctaactagtaagacatttaaaaaaaccatatccaccatgccattattacccctctttaagatagtttaatatcaaatatctaatatccttatctccctgattgtctcctatctcaaacctgcctttttttctcaattggtttgttcagatcaggatccgaacatggtctgtacattgctttcggttatggtgaagcattatttaaccttcacatataggggagtgtgatttatgtcaaagatggtaagtgatgatctgcataaagaatgtatttcttgatagacacgggggacttcaaaagccggggaaagggaaaaagggagataggttaaaatttatctattgggtacaatgttcactatttgaacttaccttgagaaatcctgctttgtatatttgcttaagccaatattaacccaacttaacactttccttcaagtctccctctttccatctttctccttccccccaatttccatttctattctgtcctcttaattatgtcaaaactcagcttaagtttcatcacctctgtgaagattaccctccaccaagccctttaatgcctgacccagcaatatgccatttagtttacattgccttgatttataaaagcaactatgtgtaagaccaaggctttatgaagcaggaaaacctagatttggttttcattcctgccattgagcaatatggtgttggacaagagcctcactttccttgtctacagaatgtggataataggagggttttcatgaggttgttttgaataccagttgagataatgtatgtagtcaatataatttttggtacttgggaacacactataagttataagtttttattattaacttttttggtttaattatgtcatctccaactacattggaaggcacctatataatgccttatacactgttagcacttcatacctttttgtagggagtcatttttttggggtattagagtgaccacttttagcccctgggatttcaacagccatctaactattcatccaattattcagatatgggtttttagtagttgtgattggataactataaggtataaatgcaagcatacgttccagaaaatggccagaatgtgagggaaagcaactgtatctattatttagtattttagtgcttgttaaagttaggagaaaaaaatactaggttaaaattagtgagtcttcatctttataggaagtttttaaataaagtttagggaggaaagagatgctgataagctgatgctgaaagtatctgtctagttaattttttgttacaaatggttttcagtgttgtttctttgcaacctcaaaacaaaatccctgccttaaaagaagaaaaagcccagccatggtggctctgcctgtaatcccagcattttgggaggctgaggcaggcggaccatgaggtcaggagttcgagaccagcctgaccaacatggtgaaaccccgtctctactaaaaatacaaaaattagccgggcacggtggcacgtgcctgtaatcccagctactcaggaaggaggctgaggcaggagaatcgcttaaacccaggaggcagaggttgcagtgagccaagatcatgccactgcactccagcctgggcgacagagtgagactctgtctcaaaaaaaaaaaaaaggaagaagaagaaaaagagatgtaatatatttcaccatggaaagttattcaacagccaggggccaggagaatcaaattaaattgaattgtgaatctgaaggcagccaggaaagtgcattttaaactgagctaagcacaagacactgcatcattaagagaggagagttacagactcacagtgaagaggagagcacttaaattgctcttgagtttcctggagaagaataaacatgtatgcaaaagcccaggaactggtttttcagtttcaaaaggaaataatgtgtgttctgtcagtggagctgagtattcaaaggctctacagatcatcccaatgggagctggaagcaaggacttgaagcagtagctttgtgtctttggcagtctcttgaaattgggactaaaattaaaagtagctgagtgcaaccagttctaaatgtcagatggaacactttgctcagcatgctgtgcacaacattgattttcctatgttccacattgttgtgtgagatgttgaatcaggttcctgttggcgcattcactaatataagagctggaaagcaacttggtccacaattaatattctgtgatgctattgtctgtatgccttggactttaattgggccaggtttttgtgaacctcttttattcttttgacacctggaggctatgttcttcttatttcaatttgattagtctttttcgtagaaagttcttatgaatgcttaaatgttgtcctttctgaatttgtactaagacacagagaggattgttcaccacatgcgaagtgaactatgggaagatttttttcaaagaagtattatggtagctatctgataactgtcattacatacacagttccaagggaatttaaaaacagggttgtgatttcagtgtctgaatatgtgtttataattttaatagctcctattaaggtttatgtgaatgtggacaccacatctgttgaaattataatcttttaatctagacaaagagtagatcaagtaagataaggggaagaaagaggactgtgggcattgaacagggtgtgtgccagagggctattcccgggagttcagagagcctcctggaaactgaagaatgacacttccttgactccatccataatagctctaaatattaatggttcacaagagagagagtgaaaaccctctggacaagaaaatccaggaattgtttcacactgggctatggtcctcaaacttccagctgcaccaaaattatctggaagccttgttaaaacatatagtattgggccccacttccagtttctcattggaaggtggaggggagcccaataatttgcgtctctgacgagtttccaggtgatgctcattcttctggtctaggaaccactggtataaggcagtgattcttgccatattttcctatgctttaatatgcagagggatcatcttggagagtttgtagaaagtgtagtctttaaaaattatactgagatgggactcaacactgagatttctgaaaaagcacccttagtgattctgctataattggtccagggatcctaagccattgcatcatttctaacacttagtatttgagtctttcatgttttcataaccatttatgggcttgaatgtcagtgaatggctgttaaagttccaatatgctttgaaaaataagagaaaataaagtagaagcatggccatatattagtggcttaatgataccagaggtgaaatcaaatctcatgaaagtctgatatattgtgattcaataatgtgagcagttagcataacctgatgtaatataacaagattttggcattaaaaacttgtccaatctcttgatattgtgtaacatgtaaataaatcaaatcttttgaaaggaagcagcaaaatataataaaaaaagaagacttctgtgatgcatgtatcctggctctggcatttacaatgctggtcaggtcacgtaaactttatgatgtttagtttttcttacctgtaaaggagacttagtaattcctattttaccatgtgtcatgaaggataaatagatacgatatatgagatggctagtgtagcttctgacatattgtagatgtttaacaaatggcagttataaaaggaagaagaaggggtaggccacacgcatctgtcatttcttagtttttgtcattgactgttaggtagggaatgcttatccaatttaatactctttggtcagcaatttcagccaatgctttttcatgcatttagacagactctgaaagtaaacataatctctcaagattcttatgaatctacttatgattgaatggacattctcatatttttaaaaatctatttctcttacagattaataggctatttttcatcttttatcacattctgttttggctactttactgaactcttgaaatgttcaaatatttttgctttgctcttttgcatttataatagtggctttttaaaatgaagaactccatcagtgcctcctataagcttattttgatttgaaatatggaaactgttcttaatgataaattgaaatgatttcaaacttctaatattttctcttttttatccttttaggtaagtaatgaaaagagacatgaagaattggtatttcaaatgaccaccatgttgcaaaaggtacttttggtattttaaatattactttaaaggaatcttataaaaagacacggaggttagaatgtaattaagtactattttggtaaaaacaatttttatgaaaacagatttaaagatgttatagcattaacaattttttaattataagaaatgtaatatactataagacttttctttctgtagtctaggcaattatcattggtatcatttgggaatgaaaaggtaaatagattgtctcttcctcaagatattcattgctggaaaaagggaggtggaggaaagaaatctgaatacaatagacataataaacacattgggatttgttcaccaaagtcatctattttctctaagggcttatgaatttgttttctgtgatcagaacattatcttcataattacttataaaattgattgctataaggttgtcaataaagttatttgattctaaataattcaaatagattgcatccatgtggagaattctccagattctacatttaaatcaaggggaaggagggaagaaggaaatattagacttaaatgatagaatgtaaaaattcttagtctatttatatcgcacacatgatttggggaaatctgcttgtatttttaagtcgtgaatctcatctagaagaatccgtttcttttctagaaggaatctacgaaatattgtgaaaatcatctcatttggttacagaggaaacaattacatggtgaactattagatgagttgtatgacaccattaacattgacaatcatgcaaatatccatgatgtttcaggtgcaataaataacatatggtgcctttgtactagattagtaatttaatccaagaacagaagatatgccagaatgccaaaagaggagaaatcaacttagctttttaataaaattgcaatttttaaagcatttctcattttgcttagaaatttcctcaaggccttacaaaattcaggtcatgtactattgaagataagataaaaggagtggggaataacttaaaattttatcctctttgaatgataattatttaacatacattttctatacttcatggctattcttttgagtgctaaaggagaaatagacaattttattaatgttggtaatgagataacattaatcagcttaggctattttctttttgtttttgttttgttttttgagacagggtctccctctgtcacccaggctggagtgcagtggcacaatcatggctcagtgcagcctccaccttccgggctcaagtgatcctcccacctcagcctgctgagtagctggaactacagacttgcaccaccatgcccgactaatttttgatttttttgtagagatgggttctgactatgttgcccaggctggtcgtgagctcctgagctcaagtgatctgcccacctcagcctcccacagtgctgggattataggcatgagtcactgcgcctggccagcttgggctatttttagaagggcagatattactctgctttattacataattaatattattatatgaatatattccaatacattttgcttcatttgagacttccaggtataaaagctaagtcagaaattggatagatgaatcttagaagctcagaggaaagatctgtgattatagtatgataaaggagaaccaattccacttcttgacaaagaagggaagaataatgatttggtagggagtgtcaaatgttgctgacaggtcaagaaagatgaatgcatcaacaaaccaactggagttttacatataaatgtcctcagtaactttggcaagggaagtttcagtagagaagcaggggtagaaaccagaccggattagtttgagaagtaaataagagataaggggatagagttagcaaaaaagatagctttttgaaaattttgtcaggaaataaaagtgcggagaatccagcgtctggatagggaagttgggatgagagagtcttgaacatgtttacattttaatgggaacagtgcagaagaaggagagagattggaggtatgggtttctgaaaaggaaggaagtgatggaggaggtggtctaggaagagggattacctatagccagtgggaaggacaacatgcacatcaacacagctaaggcaatctctgtaggatgcgtgcagatacagataggtttgtagatttggtagggaaaattgaaggggatgtcaagaaaaatttgtattttctctgtgaagaagatgtggccagagtagttaatgaggatttgaggaaaagggcaaggattgaagtatcgtttgtggagaatgagagagagagagaggtcaatattagattaggcaagtattgatgactgggaatttgtagtatcatcaaactccttaaatttataagtgtattatgtacatgaatattactctctaaaaatcagaaatcagggatcatctgttttgagggaaggtataagaaagatttgactcttcttttcttaggtcctcagttttggtatgtgtcctaataagagcattttcatggcaaaatttaagaacactttttgaccttgaagaaaggattactttaacactacaaaatatatgtcctttttgccatgactgaagagagcctgctgtccttactcaggtgtccttaggtaggcacattctttctgctctgctaagcattctttggacagtagagttagactgaaagtgttaaacaggccctgaagatgaaagacttcagtttgctgactttgaattataagaaggttaatatgtccatttaactagaaactctaaatttctgtgtcccatttgacttttaggagtgtttacttgagggcatagagctctttgtaagactgaagggatcttttagttcaggtacttaaatttttttctttgttagctgcaaaaccattttgaaaaataaaatctggcattagcaaagagaactattctgattacagtgggcatgcaggatgtggaacccacccacttatccctcttctttcccctcctcctcatcctactttcaggaagttcccctgagacatcctcattgaatctggtggctccattgaacattgtttgaaaagtacaattctaggtgatcacaactatattgaatttcatcaaaacatgaaattcttaagataaattaactgttgtttgaggataatttttttctttacaattaaaataggcaggttagtatctactttaacctaaagtataaattcttaccttatattgataattttagtgatagtatatactaattttatcaaggaagctcagcaaaaatcactgctaaatatattacaaatctgggatttgaaaagccaagcccttcttttaattaattttgctgaccaggattaccaaagttcgttaatgtggagcccttcactaagctcatgagtagaactgttcttcgttatcctcaaaggatagacatatgactgtggcagagaggattaactgccctgacattgagcagccatgaaagcatgtagtatgagttaccaggatgttgcttttccattagggtatgactttgcctagggctgaaaacatccataaagatgggatagaagttttcaagaaaaccatacttttatgttggaaagcaaagtattgataaggtagaaaagccaatataagaaatggttaaaagagggttaaactggagtatgaagaacttgctaacagagttataaagacaaattaaagagggccgtttaacttgagttattgttaatagtcagcaatgcaatgaggtggatattataacttggttttacatttgatgaaatggaggctcatagaggttaagtaacttgtcaaactcatactgcaaatcaccagcaaatgtggcagagccaaaattcagatccagatcattttattttaagaccaaaatgggctggtgaagtcagaccaaacaaacagacagctaggataagatgtagttgagactggagagacatagcaagaaaagggctggtcttcaaaatcagagagtgctactcaagtcaaatacctgcaatggctcactgagaaaaaagtggctttgagagtccaatgaaggtttatatccttagaacctgcttcctgtttagtcacttcctctcaaccttccctctaaaaactataatgattagaggactgtctctgcagggcttaggacttatgccaccaaaagctgttaatattgaggtcagataggaagatctctggctggctgaggactccccatggttttcctgactttgtaagtctggcgcattgattggctttcattccaaaactcatttcctgctgaaggtgaatcagctcagtctggccagtgtccctgccatcttctattctgctgtagagccctgaaccacacattaagatctgtacctatggcacatgaaatcttgttctagttatacagaagaaaatcacaaaaggaaatgagaataattaaaagggttaaatatgaaatcatatggaccagatataaaattttgtctcaagtttttaaaagttattttcaaggcctaggaggaccactgggacgactggaagaaaatagcgaagactaaactttttagatactggggaatagaataccttgcattaacgtgattattgataattgtatatttctgtttgcatgtgatgccaaaaatcttttgtatacttcagtggtgttaatttcccatctacttgtgtaaactaggtgtaatctttgagccatttcctgaagtgatggaatattcaccctttgttctggtcaataattgtaacataatttgcttaaatttagataactgaagcttggtattttctggaattctttttcctgaagaacatacataattgggagtaatgatagagttaagtttgttaatcttaatccatttattgtttctaaccatcaaatcaaatgggagatttctagtctctcatctaaacttaatagatatcttatccttgtattactgtaactgtattttatatgcagttcttgtgaccacagaaaataattctcttttgtttcctactatttttttgttttgttttgttttgggttaaaatggtttataatctacattaaaactcttttctgtccttatatgaaaaaagatgaaaatgaaaactcaataaaccaaagtagcacggatttttctgaaagaaaagaactgaattttggggaaaaagtattcactctgtgatgagcgtttctgtaccctacctggaaccaattccttattttgtggtcagtctatgtatagcagagactgtgtcgaaggtattggtatctgataaaagtgaacaaagttctaatgagctcattcatttttttacttttttcaaagcaaagatttttttcttcctttcccacaatttctccatttaattcatacacattaattgtaattctagaaatgctagtaattctctattatagttactatgatggtcatagaattaattaaggttacaacagtaaaatttgtgttaattattattaaccatattctttagtgttaaaattttgcaaacaaataaataatagaataagcataagtttctacaaacttatatgaatcacagtgatctccaatatctgcgtttacatgcttagaggcaaaacatataaagaaacaggaacttagcctaatcagtgaactaaatctgaaaatacggatctcacagaaaagatcatgccctcctcagcgtgaatctggcccgcttcattttgctttcctcagctggggctgttcagtggtgcaaagaaaacattgtaaaatgcttacggcttttagaagtgcttctgagttctttaaataatggtaagagttgcaaatcttataggaaggacctgtcacagaaaagctttattcagttgcacagggaatggtgaactcgttactgagagctgctctaaagagaaacacttataagaaaggggtactgaagtattcattatcgtaaaacttaaagagaacaaatgtgtgtttcattgcacatctaaacctaatatctgtaaagggggtctgtggcagccagcagagggagaaagtgaaattctgcagacggataaaaaggaactttcaacacccagcttatttttttggcagagattcaatgcactgggaattgtccagcaaaatgggttgcacttggcagatctgcaaatatgcatatttctgctcagtaccatcaggcaaacatagagacttccagaggaactaattatcttttgtcttttttaccttagaaagaggataatatttggaagacaactattaagagattttagaggcaatgtttaaaaaaatgttgaaagagaattctatatttagccttcttttaaaaagtttttaatacccatttgtgctcccaaaataatttatcataattggcagaagctcaaaccatttggtttataatttgaagacttttgtttattatttgccttttttttttttttttttttagatggagtctcgctctgtcgacaggctggagtgcagtggcacgatctcagctcactgcaacgtccgactcccgggttcaagcaattctcctgcctcagcctcccgagtagctgggattccaggcatgagccaccatgcccagctaatttttgtatttttagtagagactttagtagagacggggtttcaccatgttggccaagatggtgctttttttttttttttttttttagagatggtatatctcggctgggcgcagtggctcatgcctgtaatctcaacactttgggaggccgaggcgggcggatcacgaggtcaggagatatagttaactaatctagttagccatcctggctaacacggtgaaaccccgtctctactaaaaatacaaaaaattagccgggcgtggtggttggcacctgtacttcctcatactccggaggctgaggcaggagaatggcgtgaacctgggaggcggagcgtgcagtgagcggagatcgaaccactgcactccagcctgggcaacagagcgatatatctcactatgttgcccaagctggacttgaactcttgggctcaagagatcctcccacttcagcctgttgaatagctgggactatgggtgcgtgcccacacctggctgccattatcaatatatttttaaacaaactctgttgctatgtttttccttattatgttgtcattgacactagagagaagctaaagttgctctatatattttgtcaggtcattgagataaaaaaagaaaaaagctatctacatcagatatttagagaatatttgagttagctagaaaaatagtttaagtttttaaagtgagttagctaaaaatacatctgtttaattgattattgtgttaataattatgtcttctttgttgttaagaaactgatgtgggccaggcgtggtggctcacgcctgtaatcccagcactttgggaggctgaggcaggtggatcacgaggtcaggagatcgagaccatcctggctaacacagtgaaaccccgtctctactaaaaatacaaaaaattagccgaacgtggtggcgggcgcctgtagtcccagctactcgggaggctgaggcaggagaatggtgtggaccccggaggtggagtttgcagtgagccaagatcgtgccactgcactccagcctgggtgacagagcgagactccgtttcaaaaaaaaaaaaaaagaaactgatgtggcactttagggacggcaagtgcagttcaaaacaaattttccactttctgatgaatattttttaagtgacaacaattggaaaaagagaaggaaccggttatgtgagccagttgtttccaaacatacttattttctatgaaaagatgaccaaaccctgataccctgataaaacatattactttagaagccatttattcctacttaaaagttcccaagcaaaatttcactcgtgtaatattgaatttaagaaaattaatctagttgccattttttgagtggggtaaggggtggtgtatattatgattttcctatccctcccattttcttatcttttaagtggggaatcccaaagtaaaaatatatattcctagaaaagtaacctggaaaatatcacacaattatgagagcttaatagaggatagcccacactatggtttctagaagaccaaatttgtgagcagcctaatttattttgatattattaggaagaagtcagccatgtgaccagagtgaagtagagatatgtatatgtaaattaaataatttttaggttctagtcccagttacttgggaggctgaggtgggaggatagctagagcccaggagttcaagtccagcctgggcaacatagtgagaccatgtctttaaaataaataaataaataaatattaaaaaataattttcagattctagaaatgactacatctaggaagacatgatgtaatgaatgttgatgggggtggtgtggggtaggggaagcactagactgaaaatctgctgaagtctctaaggttttttccaaatttataattttatgttataatatgtagatgattggaacaaagtgcactacataggctcgggatgcctatgtaaccgtaaaaaaactcatattagctccagtggtagagtacagagttcttcatatctattgttgctaggatcaatcccattctaaccatccaaattatttgataatagcatagtgctatattaaatattacttgaatattaaaatttatgtaaatggccagtaatggatacttaattacctttctgtaatgtagagttttatggtaaaatgaagcttattgtaaaggattttgactagtataattatttttcctgttgaatatgtaaagtcaatattatcagtctctctgtgttacctaggcttgccttgaactcctgggctcaaacgatcctaccacctcaacctcctgtacacagtatattttaatgttaaaacaattgattttactttggacttttacttattccaaactttcttaatactgtgtttctgatcaggattaatttttgaataatacattttgaaactatacatttttggattttgctcagttaagttttggaatctgtatatgagtttaataccttgaattctctggatggttaaaaatatgtttatagcctctctttccctcatttgtacaaatttacagattgcctcatctataaacttgttagatatgcatcataaagttgtacagatatacctgtttttgttcagtaacttgaaagccctatttggaaatcatagagaagttataacatagtgcatggactagagtttgaaagagatccaaaccttataaaaatgagtcaatttgccatggaatttagataaatacagcattttgaaatattttttctctatatatttttaaatattagataacttttcatggatattcatcctgtcttttttttgatgggaatattttgttgagtaatagtaacatctataattcttactttctactaaggaactcaggcacatcacactttgagatagtttttttggggtttcttttcaggtagatttttattaccctccttttgtgaaagtggaaactggggcttctgtaacttgtttgggtcatatcagtggtggttcaagtagacttcaaatccacctgtctgactccaaaactcatgcttttaatcatgaagtcaaactgtaatttacgtatctaaatacatctataattgttttatataaagataataatgaaaaacccatttgtgttactgttattatatcagtcatttacagaattggcatagggtaaaattaggtgtgcatatcgtatctaaagtgaactaaaatctggctgggcatcgtggctcacgccggtaatccccgtactttgggaggctgaggtgggcagatcacttgaggccaggagttggagaccagcctggccaacatgatggaaccccgtctctattaaaaatacaaaaaaattagccgggcgtggtggcacaagcccgtaatcccagctacccgggaggctgaggtagaagaatcacttgaacccagaggaggatggcgccactgcactccagcctaggtgacagagcaagactctgtctcaaaaagaaaagaaaagaaaagaaaaaaatagtgaactaaaatctgatttttcccttatttgcttacttttctttctgtgatctgaggaaaacaaaaggacccagcccatgtggcttcatattgggaagaagaggcacccactgtttcctaaaatttagagctagaaggggttggaaagagccgatcctacccctgtttttttagaatcaaattcctgtatcacagttgaaatgattgtcaaaggtaagagcataatgtttgtctgttgggggaaaagtctgttggggatacctgaaggaatacatgaatttgaagatgggaattctatttttggaaagcttaatgcagcaaaggctgatataatagcaagtgacggctgcctctggggctgagtccccatgactactgctttctcctgaataattactggaaaatacatctaaactaaagtttatgactaaatttagggcctatatgttctgattttccccagataataaggctatgagttctactgaattgaactgagttacagaaattagattttcatgcctttcctagttgttactgttctttatacagcttacatattttttagagcagggatcttcttaacttcaagatcctcagggactcaaagttcatgatgggagctcagcaaatgtactgggatagacagataaacggtatttgtgtacgtcaaacttgatctaaagaccactttaccaagaacatgaggcccaacagaaaaataagactttaaatagatgtttttaaaggataagttccaaagaaaaatataaaatggggtctattttaaattttaaagactggtagcaagatagtatgaattattttttcatttggccaggtgcagtggctcatccctatagtcccaacactttgggaggccgagttgggtggatcacttgagtccaggagttcaacaccagcctcagcaatggggtgaatccccgtctctacaaaaaatttacaaaaaaattaactgggcatggtggcatacacctgtagtctcagctatttggaaggctgaggtgggaggagcccttgagcctgggaggatgaggctgcagtaagtcgagattgcaccactgcactccagcctgggcaacagagtgagactctgtttcaaaaaaaaaataaataaataaataaataataaatacatttttttcaatttatttttggatttaatcttgagtttgctttcattattgaggctttgcaattttatttctgggcacatgaatttgcttagtataattattatataagtatatactcactataacatttgtcttttatcacagaattttatatacggaacataaaaaattaatatatgcaaaaagttttccattcctgcgtaactctttggtgtttttaattgtcagatattattgatatttagatgctccattgagaaaaactgttgtgtgagtttcattaagataaaaagttaaactacctagtaaaagtatatttgttttatagcttaaacaggaccatttacttgtgaattttgaatgttacaatttctgaattaataaaccagtcacatgaatctgcaggatttttgtgttctgacatggttctgatgaggaaatgggctaatattaaacctaatagtttatggatataagtgacaaaaatctgcctttttcagttattgaaagttactgcactaaatgcactatactaaagcatcttaataactgagcaggactatgagcctcagtgatagaaaataggagaatgtggggttattaatcaaaatcacctttaatgtgcatcataattctacatctaaattatggttatgaagcagaggaaactgatctgtaaaaatttgaataatcaatgcataaataaaattcctgccttcaatctattacatatttaagtatttcaatgaaacatttgtagtctgtatatttggtagcagtttggatagcgatgttactgcgagtaaaagtgtcaactttctaccaagacctctttctccttaatggctgggattgagtccctttaatatctcccattcctagcacaaggtcagacacattaaaaaagtaaaaagcaaacaaaaccccaaaactctgatacacatttgtcagataaatgaataggtgagaatttatgagaatatcttcaactagtataatagcatcaggattttctattcaatgtattttaataagcaatttaatgatcaaattatatatctcattatatataaagtactgtgatagatacttcagtggcattaagatgtcttaaacagggccctgattttaaggaactcagaatcataaagaaaatatatagggacaacttaaattccagtgccataaatgctaagggagcagagaggcatggcttgaataaagaccaatggatgttctggaaattaggaaacgcatatgcaaaggcagggggatgtgagaaacatgcaaattccagagcagcaagtcattccagatagctagacctcacggtttgtggacattataggcttaagctgtggtgtccaagaaccacacaactactttatgctaccaactttctgctaaagtgacaagcaccacaatgaaaaagagcttctaacagactctttattgataactctcgtggatctaaaatgcattccttttcatattacatcctggtcaattctacaaacttttaatgctcccaacttccaatgttgttgcttattctcctatttaagattttgctttataactttagatttgatgtcctgaagcaatatacttatcctccaccaccaacactgccatgatcagaattcctgcggctgatacaaactgtaggactacattggaggtaaaattggaaagaaaaaaagtggagctcagttcatgagggacctttattccatgtgttacatgttgaaagtctaaagagaaagaagtggcagtgacaataaacctcaactgtttggttattaagatatattattagatgacatacatatcttggggatttatcatggttcagcattgaatccttactttgtaggctcagaaactaagtttttcagtgcactaagaagagagcagtctcttgggggtgaattcacattaagtaacctcacaggaagtgatgtataatatggactttcaatatgtattgtcacataaaattagaatagttgtgccaaattaatttggtgttctgactttatgggtcaataaaactatgtgggaacaaaatactagccaacaggtttttacataagcacgagaccagaagaaggggaaacaataatataatttgattgtcaatggcatcaggctagtacctcaaagcactacctgcataaaaaagattatctggctaccaggattggagtgctggagatttggggcctgcttattgcttcccttgcttggactggcactatcaacatctttcttctctgaccctgctttacctgtcagttctttacttatgcttttagtcaaagcatttttctgagtagtcacctattcaaaaggtaaatgggttttattacacaggccatctgattgattaggggcagcttcctggaaaagtcttgagaagggctctgagctcagccaagctcagtggactagcgtgctcctgaggtgatggttgaagtctgccccggctcagggagggtggaatgaagatagcttgatgcatttggcatccttgcataaataattcaggttatgaaagcacccgaaagaacataagtgggaaagtgacatcaacaagttttcatttagtgaaaaaaaaagatgatcaagtcaccttcccagatttgccgcacccactctcactctgaaagtaagctatttgacagtagcggggagacgtggcggaaacatccaagtccggacactagttttctttgatcgccctcaccatggctgctgcatttgttgtctgagtgaatattatttttcctgtttgaagaatagagaggggaatgatgccacactctaacaaataaaactaaaaagcatggcagtaatattaattatgtgatctactgtcttcttaagtgttttgaatgttatttggcatatcaacagaatgaatagttttggattgcaaatgattttttgtatcctttaattttcatgctgtttgctttctgtttttgaaaatttgttgaagattgtccttgacagtttgtttttctaaattcccacttgtttgtttgcttggctgttgtttatttggctacttcttgaacgtggaattcatgtttgcatatgattatatctgcataattatttgagtttatatatagctaatcaggggtggtaatatgctctgctttaattgacccctgattacttctgctttctatggaatttctattttctttcactttttagttaataaagagttatttatcattttccacatggaaatacccttttaggcctgagtaaagtagaccttttctcagcttagaagaaatctcttagtatactggaatatgcatactaatattgtcttccagctttagctccatattgacaattggcaatagcatcttttgtattagatggatttataggtgatagtgaagacttgtagcagttatatggagcagggtatagcattaaagcaatttattattttataatttgtaactccattagcgttactcagcttttatctctttatcacagttatttttatttataaatgttaactattttttaatgtatgtaaaaacaagcattattttaaattaaaaactatggaaactcactcgttgatggtcattagtgtcggttgaagtccaacgtgtcaggtaaggaaataaaacaattagtttattttatgaaggccaatttaatataattaatgtatatactaattttcatgtatgtttatttttaatgtgcctaagtattaacagtgcgagatacatagaactttcaatattctctttatttttcataagacaaatgaaataagtataataccaaatttattttccttaacaaaaagtaacaagcagaaaattcgtaaaccagcattttattcaaactcctgtcatagaaaataatcatttctttgctttaattttactaagtgttttgcaaatgtagcaaagtgttgccaaactaatgttccagttgagaaatacaaaagcgaactttaagtgcattatatctgccattaatgaaaatggaacatcttaatgcaagaataaatatcattttgattagtaaatctgtcagcctaactatagcttttctttcttgtagctattaataatttattatatttagagttgaataataatttattatatttagagttgaataataatttattatacgtagagctgaataataacattatggaattttaggtttcttgggaagggccttttcagatcatttggtccaatgatattattttaagtattgtaggagtaaaagttcctcttctctccagttagtggcaaaattaggtctagaactcgtgtctcttgcctctaagcccaggactctttttcaccactctatgttgcctctgatttatatggcatgtaatatacactaaccctttataagacacaaagtcaatctgcatttgtaatgtttaatgagaagactcagctcattcttctttttaaccaatgtttataaaacatactgtgtgctggcaacaactactgagatggttttagggagagacatggtctcatgacattagagtgggaaatgtccatatatactgccttcctatagccaaataaagtgtgttttctatcaaaaaaccagttaggaaataataaatgtttccaaaatattatacatataccagaggatgtagaatataacactaaagagacaaaatgtgttttatttctatgttttaaaaatctgaacaaagtacaacagtctttaaggatctttgattgtttaaacatgtactttacttttacttataaataatataaattgaacattaatattttaaattctcttggatttccacaggttttaccatattagttataaatagtgtgcagttcagcacagataagccatttatttgcttactttccttatatagcatgtattttcatactaccatcaaggatgctctgttctattctcatttagttgaaccctcatattcactataccatatggcacatacatgtacttgaggatcaaggagtctctcttgtgcctcacctcccacttttattgctttgaatgccaaatagaaaatagttaaatattatatttaaagttaaccctaaattaaagctgttgtatagctcatggatccctgataaaatattcagggaattttatttatttaaacacatcatgttatcagagtgtttttaatggtgattagtccaaatgaataattttatgtattattttctttttctctttttttttttttttttgaggcagggtttcgctgtattgcccaggctggagtgcagtggtgcgatctcggctcaaacaatcctctcatctcagccttccaagtagctggggctacaggcgtgtgccacgccatgctaatttttgtatttttttgtagagacggagttttgccatgttacccaggctggtcttgaattcctgagctcaagcaattctcctgcctcggcctcccaaagtgctgggattacaggcgtgagccactgcacccggctgattctgtgtattattttcttatgagaaatattttctgcattaggtttctttaagttttttttttttttttttttaactgttccataatctgacattctaaaagtataaattattttgaggattgtgaggtactattcctctaattattttttaaagagatggggtcttgccatattgcccaggctggagtgcagtggcaattcacaggtgcaatcatagcacactacaacctccaactcctgggctcaagctatcctcctgcctcaacctccagtgtatctgggactataggcacatgccagtgcacttgacttctaatttttttcaaaacttcaagggagaatttaaaataccattctatttttttttttttgcattatccactattttttcctgtgtttaaatgtttgttatcatggctgctaagaaaagtttattactttttcattgtcaaatgtcaaatagcatgatcttctgtggatactacttagaatttataataattaggctttaattcatttgtctttgaatatgtttttctgggaactgacaactgacaggtaccagatggaataaaactctggtctgaaagaagtttctgatgctggtaaccagctccagtgctgtttagcattatggcctcgaacaactgactaacatctttggacctatttcctgagttgttaaatgaagaagtagaactggataacttctaaagttccttttgattcaaatattgtaattcttgaaattgtagggctactctaactcgtcttaggtgtgcccacatacaccagtttctagaacctttggtttcctttcactgcagatttagagaggggagactggctctttctttaagagtttttaggacagaaagcattttttgagtatatctgtattgagctgcactttacttttcctcacactaacctctctaattttcttaagtggttgttcaattctccttttcatgtagcccaagggtcctatatatggctcatggtgttgcattcaatctgtgactgggtttttttactatccacatgggccgcatttaacaaaataattgacaaggaatatttaccaacgatgaaatcctgttcatctgatttagcccaactaggctgaatgttgagaaacttttaccttcagcaatgttctcaagactgtagaaaaatgatacaaagaagtaaaagacaggggatttgatttaaagatactacagtgcatattcaataatgtagttctgctaggaaatatttgtgatagtagcatagactgtttagccttgtgtgacagagtcaaagatggggtaagtcagttattttgagcaaagatttcatatagagcttatttgaatatgaaaaggaaggtcctagaagcttgatgtaataatcagtgtagacaattcaatctcagtgttgtatttaacctatttaactatggtcaaaacctgaaaaacagctttaattgaaaatgactctctaatattccttgtcactgataccaacctagcaaaacccaagctacagtagaagaggaaataaagttcttattttaggttatctcctctgtttctattattataaaagataagttgtttttactgtgtcttaaaagaaaagataatatcttacataatgctaggattttttttctagctacaaaaaataccttgaatttattattagacgtgtagatttaaatgtcacaagatatgtacttccaaaatagaggtgcagtttcatcaatcagcataccgtagtggacacattattctatctttaacatttttatattttgacatttagtagcactagattcaaagctaatcccactcaacacatagcactaaactagacatcagtgaaattaaatacatttatattccaatactttaaaaattgctctaagggataaaattgaagagttattttaaagtgtttttaatgttgttgtttcattgcctttttcaaatataatggtaaaacatttgccctagtagagtgctgtatgtagtgggtacttaatctgctaactaaaatgttaagctctatactgtggaattcctttcaaaatgaggctgattataaagctaaatgttgctgtattttttttttttaatgagcacctgtctaatgaaatcccccaaaataacaagctcaagtgatacataaaattggggaaaaataacatgagctagatatttttgaaaagaaagaaagactgtcttttgcaaatatgaattagatattaagcaaaaaattcatgactgctctaaaattagaatgttcattttaagtactcccaaagggccaagtgctgaaatttgaacagtgaaatgaacaaaatgggaactaaaatattaacattaagcaatctcttgagtaaagttgtaaaaaatagtattggtcacttttactatgttgttaagttttagatattggaatagagaggaaggaggaatttggaaaggaatataataaaacgcccagattcttggaatttgattcaaaccagaaggaaatgatctctgaaattcagcacagattttaaaataataattcttccagttgtgaaacactttagtcgcacctctgctttaatgacttggaagataattctataagtctcagtgtaaaaaatgaagaatgatatataaaaatgattttaaagttaattaaaaaggtgaagatatactgacattttaaaactaagggccttttagatttcttgaaacatctctaaaagatgtgagctggctggcgcagtggctcacgcctgtaatcccagcactttgggaggccgaggcgtggggatcacgaggtcaggagttcaagaccagcctggccaacatggtgaaaccctgtctctactaaaaatacaaaaattagttgggtgtggtggtggggcccctgtaatcccagctactcgggaggctgaggcagagaattgcttgaacccgggagacggaagctgcagtgagctgagatcgcaccactgcactccagcctgggagacaaggcaagacttcatctcagaaaaaaaaaaaagaaaaacagaaaaaaagaaaaaaaagatgtgagctgtgtatttatgggtaacacttcatcttagataaccagtgcatattctggctactgctgggtgagaaaacagctttttaaaagctgacttatcaatactatgatagccccatttagaaaacaataaaatatttaataataaggaaattgttaaattatgaaacacatatgaaattagatattatgtagccatttaaaagtagcttttaaagaaattgtaatgacaggaaaaaagtccactaccaataattttaaaatttaggatgtaaaaaagtatatctaacatgctctcaactatgttatttatatgcatagaaaaatgcaaaagaaatacatatatgacagtagtggtttttatctggatacatataatttttcttcatactttaatttcaaatttttcttacattaaatatttattactttttttttttttttttttgagacacagtctcgctctgtcgcccaggctggagtgcagtggcgcgatctcagctcattgcaagctccacctccccggttcacgcaatcctactgcctcagcctcctgagtagctgggactacaggtgcctgccaccacacccggctaattttttgtatttttagtagagacgaggtttcatcgtgttagccaggatggtctctatctcctgacctcatgatctatccgcctcggccttccaaagtgctgggattacaggcgtgagccaccgcacctggccatttatcaccttttataattagaaactacatttttaaaagcttgctgatttcaaaggtgactgtaaattacagtagtgaaaataatcattattgagtttgtgataaaagctagttttttgaaatgtacaagaaagaaaagagcaaagaatgcaaaaaacacctagattaacctgaaacgggtcaaatgcttcagtttgtctctcaagtacagcagccactgtcttagaagaataacatccatctgttttctatctgctacagtacattgcataacatttttagaaatatgcatgtttccttttactattgatacaaaagatatatctgcataacgtagatcctattgactatagaaattatgtcctgaaagaaaaatttcacttggttgaaaaaaataatagcttcaatctgcaggtccctgctaatatgaaacttggcatagtcctcctagttcccaataatagtgatagtaaatacctcaaagaaatttttaattaataaaatcaaaaggtataagtatactataaacattttctgcctacttgaatggaataaacttggaagaactttgggagattacatagaagagttggctgttacagaattataagtagtttaattaaagttgtagagcatgaaatgagtttttttcctggatttctctggtaatcaatccattattccacagttggatggaaccatggtcagcaaagggagaaagctttagtggtcatgaaaagaaaatttggtgatacttttcttttaatagaatgtttacaagtaaagtcaggcattaatagtttgtgttctagacctctacacaaaaatttcagaaataacttgcttgaatcttttattttttagccaacagtgtgtcccatcttgggctgaagtggggggaacctctatcagagtcattttaaaagttcagggacttggattctgtgactggagaatctgattcagtaggttttcagtagtgtcagggagacagtatttaaacaaaacaaagcacagcaaaacaaaacagaacagaaagcctcctccagtcattttggtgtgcagtccaaattgagaatgactgggccatatgtgccagccattgaggatacaaagaagtaagttatcaggcagatcctcatgttgttcattctctgaagagcagctcagagtctactctttaaaattggtaaaatatttctttttctaataaaaaagatcttttcctgtcatgaactcttctcccacatgttgatagtttttatgtttattgtctgaggttctaccatgccaggaatatgagggcaaagaacaggtcagtgattgattcaattatgtcagcataaattatcaaagatctgaaatgggcagaagaaatcactgggtgtctgttcactggagtgctaggtgttgtctaacagacctccaggaattatctgattctataagggtgtgcatatttgattctctttctaagctattttataacttgtagaggtagatgttaatttgtagaaaactgataaggcaaatgaatcttttccatagaaatgctaatacactttgtcaagcagaaatataattaatttctctcctagagaaaagtaatcccaaacattaaattttactgccatgtaagatactaaccagctttacatatattagcaaaatcgtttcagtatttagcatatgtggttgtccatattgtattagtccattctcacgctgctctaaggagatacctgaaactgggtaatttattaaggaaagaggtttaattgactcacagttccacaggactggggaggtgtcagaaaacttacaatcatggccaaaggggaagcaaacacatggcagcaggaaggagaatgagatctgagcaaaggggaagccctttataaaaccaccccatctggtgggaaattactcattattacaagaatagcataggcctggggagggaaccacccccatgattcaaatatctccacctggtcccacctttgacctgtggggattattacaattcaaggtgagatttgggtggggacacagccaaaccatatcacatgtacatatatcagattcacctttgaaccagttttaacatcttactgatcctctcattaattaattagctacataaaatcctttacttatatcatcttatattggtatgatagctatgactttaccattttgaaaatggtgctttaacaactataaatccttacgtgactcagatttgcctttggaatggattttccatctgggatatttctatatctgttgctctttcaagtagtggctattttcttactcgtcactacatgtcactggatcaggagacaggatattatattccctttgctcattgttgcccctttcagaagttgagacaatacattcacaagtctttctctgatatcacaacactaaaaaacagaaaaaattggtacatcatctgcccttgctttttctgaaaaatctattgtttcagatttgtcaagaaaaatcaagtatcttgcaaccattggttacatcatagtcattctcatgtcttttactaaactatagtcataaactccattgcattcactggagaaacattccttgctatcatggcaacaggcaaaacatgtcaaagtgatatgtaacttgtacatatttctctgacctgttgtatggagatgtgactttgttcctgaaacaattcaaagatattctcttttgctttctagaccaattaactttctcatactgaataaccagaacaagaaaaagctgtcactagatactttccgtagttaattaagaaaactccagctgtgccattagcctacataatttataagctctttctgattttctaacattccgataggttcattctattttaaaaaataaaaaagaagtacacttttggaatatgtcataaaaagaaacatttaccaaagagtaaaatcatctgtgataacctgcttattaaattttagaattctgattatacatttaaaaatagtacaaatacagagaaaataatactacactggacttcacattaaagtggttgctttatttttttgaactcgctttgaagtaattatacttgccagaagtgtctttcatttttctaagctgatagagttagaaaaagtcttaaatagaaaaatagtatggtactataaaaatagtatggtactataaaaaatagtatgatactgtggtatgtagttatctagtatagtactgtgagacatttccattgtcaaccataaaaatatacatttttcttaaaagatctaagatagaattttttggcaatcataattgttactggctgaactgtgtcttctctgaatttcgtatgtcgaagtcctaaccctcagtactttagaatgtggctgtacttggttatagggtctataaagggggtgattaatttaaaatgaaatcatgagtgtgggtcctaatccaagacgactggtgtccttctaagaagaggaggttgagactcagacactcacaggacaaagacacacacatgtgtgtaagaaagaccacatgaggacacagggaagagacagccatctgcaagctaaagagagaggcttcagaagaaaccagtcctacttgacacttcgatcttgaacttttagctcccagaattgtagaaaatacatttcttttgtttaacccactcatcccgtctttaggtttttttttttttttaagacagagtctcgctgtgtggcccaggttggagtgcagtggtgtgatctcagctcactgcaacctctgcctcctgggttcaagtgattcttctgtctcagcctcctgagtagctgggactacaggcgtgcaccaccatgcccagctaatttttgtatttttagtagagacggggtttcaccatgtttaccgggctggtctcgaactcccaacctcaggtgatctgcctgcctcagcctcccaaagtgctgggattacaggcgtgagccaccacacccagcctccatcttcagttttttaaattgagttcagggtagaatatgacaaccaccactcagattagtctataaataggtaaatttttacttaccagttaaaatatctttgactcctttctttggtcaaagtcaacttctgcttttaggaagtccatgatttacactactatacttctcttattggcttgaaaatgattgacatcttattaattcattaagtaaatatctgttctaaaaagggattacaatgagaaaggcaaattgccttcagaattatgaacaagtgaagaaatgaaaagatctttatggcagggaagctcctgaacttgttggcttgttgtgaccaatcttcatccattttgaggattcattgtgttattgtgttcatgggcagcactgcattaatctttcttctgtgcttctgttgtggccagcataggcactagccagctggccaggcttagtttttcctaagaaatcttctatttcttgacctcagatgactggtctctaggtgaattcagagataaatgaggtctggattacaatgagtgattgttcttgcatccagagtcaggcgcctccatggtagttctcactctcacaatctgcactgaagactcagccttagttctctctctctctgaggaccacaatcctaatgacgcccctctctgcatgaggacaggcatggtgacttgttctgtcttcttcctagaaagtagtagcctatacagatgttgaaagaaaaattatcctatgcccaggttacgagtagacattacccagttaggagactgtgataggatctgtgattcataaagtacagtctctttgagtgattgtcttgtcacttgtgaaataatgaactttttgcttccaatgtcacataatggagttggtgaatagggtgtgctgaaagggtagaggaatggaaggaggaagatctgatcagaaatgaaagctccctttttttttttaacagccattttcctgctcattgaatatgtttaggctgtgtctggtggctcacgtctgtaagcccagcactttttgggggctgaggcgggcagattgtttgagccaaggagtttcagactagcctgggcaacatggtgagacccagtctctaaaaaaaatacaaaaattagccaggtttggtgtgcacacacacctgtagtcccagctacttgggaggctgaggtgggaggatcacctgagtccagggaggtcaaggctatggtgagctgagatcacgccactgcactccagcctgggcgacagagccagaccctgtctcaaaaaaaaaaaaaagaaaagaaaatgttcaagtgttgttgaggagtgctacctctacccaggcaggggagttatagtatgaggggcacacagggaaggctggatttgactttgtaaacggttaaaaaaaaaatgtaggagtaagacttaaagtgatgacgccgggtgcagtggcccatgcctgtaatcccaggactttgggaggccgaggagggcagatcatgaggtcaggagttcaagaccagcctggccaacatggtgaaaccccgtctctactaaaaatgcaaaaagttagccaggtgtggtggtgcacgcctgtaatcccagttactcaggaggctgaggcaggagaatcccttgaacccaggaggcggaggttgcagtgagccgagaccatgccattgcactccagcctgggcgacagagcaagactccatctcgagagaaaaaaaaaaaaaagacttaaaatgatgaaaggacaacagacaaataacaagcagagcctcaagacatttacatatagaaaatgtctcagaggagaaaacaagttagacaggcattgagaagaactaccagaattttggtcagaacacaaggtcatggaggcctcaaggtatgagttgtagataggcaggaagtctgatgatttctaacagttccttcagtcctttcctcacagttatgataagaggttttaaacccagggtcgactctgcacatggctagggagaaaggctgggtgcagatgatcagagggaatttttggggaagtggttaagcagagcagggccgtggagaccggagtcttagtggttggaaataagaggcaccctgaaaaactgaggtcttcttctcaatcccattttatcgtagactcaaagcataaatctgtggttttcaagaagctgtaggattgctgtaagctaaagaaaagcttgattgaatactatttattttacgtacctttcaaagatttctttcttttctttttttttttttttttttttttgggacagagtctcactttcgccgaggctggagtgcagtggtgtgatctcagctcactgcaacctctgcctcctgggttcaagcaattcttgtgcctcagcctcccgagtagctggaattccagccatgtgccaccatgcctggctaatgtttttgtatttttagttgagacagggtttcaccttgttggccaggctggcgtttcaaagatttcgaccctgataagttccataaaggctcctgcccacttgaagtaactgtaggttggtcttgatgtttggagaatcatgtgataactctttcaaacagtatcctatgctgatttataaccccaatccagatgtctctaactatcttaataggaattgcacattttaaacaggtagagttaatatttgcttataattggaagtgacatgaaatcaaacaataaaaccttatcatgactgtaaaaaattgagaattgctgtttaatagaacataggtactgaagattcaatttaatccatatattcatacttaaaaagacaacatagaatattatagtgctcctacttttaagaactagctatttatcaacaagtgttaacttgtggtgtactaagtgcaagagacagcctttagcccgaagatagtgataaaaatgacatatttgctttgggaggctgagacgggtggatcacaaggtcaggagatcaagaccatcctggctaacatggtgaaaccccgtttctactaaaaatccaaaaaaattagccaggcatgttggcttatgcctgtaatcccagcactttgggaggctgaggtgggcggatcacctgaggtcaggagttcgagaccagcctgacccacatggtgaaaccccatctctactaaaaacacaaaaattagccaggtgtggtggcgcgtgcctgtaatcccagctactcaggaggctgaggcaggggaatggcatgaacccgggaggtggagcttgcagtgagttgagatagcgccactacactacagcctgggtgacagagtgagactccgtctcaaaaaaaaaaaaaaaaaaaaagatacatttggctgaaatgttatatgatcctaacaaagtagtttcattctgcagctgtgacttttttttttcctgtaaagagtataagttttagtgttagtccaaagtttaagttgtttgtaatcagatttagtaaaatgtaaggccaatgagaaagagagtctttatcttaaaaatacttcccagattactacctataatttcactcttcaaagatctctttcaattagttttcaaaatagtttaatactagaaaacattaaaatttcactcatgtaaatgagtgaaattaatcaaaggaatcaacttcatgttacttttgaaattctatttctttctatattcagaataatgtaaaagttcaatgatccaccaaaatcaactccctttcttctttgcctctgttattgtacctttttctatttggttataatttccatggtatagcagaaataagaatggatcagaagttaaggggcatgattcatgaataaattaactgtaaaaaatgttttggatataagcagggaaatttggatattaagtgggaattagttgatattaagaaattgttgttacttttgttagctgtcataccagttcatggttatataaacaaatgtacttacatatattttagagatgcacactaaaggatttgtggtgaaatgccaggatgcctggaatttgctttaaaatactttagcgaagtattaaaaaattaagtgaagacaatgttattaattgttaaatctaaggaatggaaatataggtgttcactttacaagtctccctctgcttttatatatgtctgaaatttttcaaaataaaaaattaaacaaaaacaaaaccagaggtagatattctggtttctgatgcacactctgtagctttggatatatcacctaacccttctgattttcaatttttccagttttaaaattgaagaaaaaaagagccacctaactgtgaggatcagacagtctaattcttttttttttttttgaggcggagtgttgctcttgttgcccaggctggagtgcaatggcacaatcttggctcaccgcaacctctgcctcctgggttcaagcgattctctggcctcagcctcccgagtagctgggattacaggcatgctccaccaagcccgggtaattttgtatttttaatagagacggggttttgccatgttggtcaggctggtctcgaactcctgacctcaggtgatctgcccaccttggcctcccaacgtgctgagattacaggcatgagtcactgtgcccggcagagatggtctaattcatatgaaagaactctgaaaaaagtagaaagtgattttctaaaataaggtacaaataattaatgtaaacataatcacctaaccttgtggaatttttttttttttgagaagcaaattgcaaatttgtgatagatctaaaggagattgactaagagggtgaccatctggaaatgacgtcatgtgagaatggttaaagatgctcgggagattgagcctagagaaaggaagatttgtgaaagggttgggggagttggagcctgttcgttgttttgaaatatttcaagttatgaaaattcacctagtgtagtttcgggagacagaattgtgaccaatttatgagagaataaattagaaggtttggaatcagaatttggaagagcttcttaataaaaacttttgcaagatagaatttaagtgtcttgtaaaataaggtgatttccgtaattgaagttttccgaggaagctagtgaccaactgcagagccgtgctaaggtgtttctgtctttgacctcgaggttggatccagctgagccttgagaaacattccagctgtctgtggcttcatgagtccctgttgctccatatctttctacttttcattttatccagaacattactctctcgacattcttttcttctccctccggtctcctaattcctttctatttgaatttttaatcaacttttctatattttcaacattttagtcaattcagtggtatttattagattccacgaccacatttcctctttcagccccgcttcctctcctcagtatttattgtatttgtttcttcacattttgttaaacacatggttacaggatagaattaatttataataactattgagcattctttatgtgtcaggcaatatttttgggcactggagattcagcactgaacaaaataaaatatccttgctttcatgttgtttatattctagtggaaggtgacagaaaaatgaaatatatgctatgtatatgtgatgtatatattacacttatgataagtgctacaaagaaaaatacatgagagtgctgggaataggaagggcagaggaggggatgttctttatataggatagacaggaaggtcattctgattagatggcatttgagtagagatctgaagggagtaagagaacaaactttagatattggaggaaagaatcttccatatttagggaacaatgggggacaaagtcctcaggtgagaacgtattttggttgttccaggagcaccaaagcattcactgtggctggagtaggtaagcaaggaggaagtgtaggaaccgaagtcagagaaagtgtgtgtgtgtgtgtgtgtgtgtgtagggtgcagttgggtgctagaacacatagtgccttataagttcttggctttacttctagtgagatagggtgccacaggagggcttctaactgagatgtgacatgatccaaactgtattttaaatatattttctttcattcagatttactgctttgaaaagtggaagttaaacagaaatctaagtgtaaaactgtgaaggcaaatatataatctttggtttatttgaatcactattctttgagtccttctgatggggcaggcatagtgcctaattctaggagaaagatgtctgagccaggtacttgcctttgagatcatctgtctggtgtcttttcttctcagttctgttattattgaagcacacaataagcataacaatgacaatgacaaatcccctttgagagtcttgcacagttaatactgtgaagaatataaaaataggcctaacactttgggaggccgaggcaggtggattgctttagcttggcagtttgagaccagcctgggcaacatggcaaaaccccgtctttataaaaaatacaaaaattagttgggtgtggtggcgcacacctgtattcacagctactggggaggctgaagcaaaagaattgcttgaaccatgggaggcagaggttgcagtgagccgagatcatgccactgcattccagcctgggcaaaagactgagaccttgtctcaaaacaaacaaacaaacaaacaaacaaacaaactcaaccaagaatatagaaatatacaataagacccctcaaagaacttaaccatcattcacagcaagagacaaggaaagacatacagaaattaaaaatttacaaagcaacatcagtgatggaaaataaagaaagctaatctttcctgggacaggttagtctcagaaagactgttgctaagttaatctgtcactagctcaaaatgacagtctgtcagtggccactgtcaccacctatagtgtaggcagcttctgcgttcttttttcctgaagcattgctttgtctgtctctgaaattatgttaattgaaagtttgtaaatggaagagcttcagcattgtacagaaccaaatggctgatgacttgggaagttaagtgtaaagagctctgggatgtgagaagtagaaacaatgataacactaataattaatatgtattgagcactttctatgtgctagatacttttctaatcattatccttttttttttttttgagatggagtcccactctgtcacccaggctggagtgtagtggcgtgatctcagctcactgcagcctccgcctccggcgttcaagcgatcctcctgcctcagcctcctgagtagctgggattacaggcgcgtgccaccacacctggctaatttttgtatttttagtagagatagggttttaccatgtggatcaggctggtctcgaactccagacctcgtaatctgcctgcctcggcttcccaaagtgctgggattacaggcgtgagccaccacgcccggccagcattatccatttttaaactcgttttagtcttgcaaacttatgaggtactattactattcctatttcaccaagatggaggtcaataatctacacagatcatgttccaaactactataccaataaagtttatttataattttttttttgtttgtttgttttttgagacaaggtctcactctgttgcccaggctgtagtgcagtggcgtgatcatagctcattgcagcctcaatctccggggctcaagtgattctccacttcggcctcccaagaagttgggactacaggcatgcaccatcgtgcctggctaatttttttagtttttatttttagcagagacaaggtcttactgtgttgctcaggctggtcttggactgaactcaagcaatcctcccgcctctgcctcccaaagtgctggaatcatagacatgagccatcacgcctggcctacttatagtttttaagcacttttaaaatttttgtccaacaaatagatctgaatttggttctgaaagcttacaagtatcctagcaggggatcgaaggatgggtaaattagtgatgggtgacaaaaatctcaccttccatgacttaccttttggatggcaggctctatatggaagcggctataaaagtactcaagatatgtgagtatagaatttctttgtaaaaccacaattattgtcttttttttttttttttgagacacagtcttgctttctccaccaggctggagtacagtggtgcgatcttggctcactgcaaccctctgcctcctgggttcaagtgattctcatgcttcagcctcctgagtagctgggattacaggcacctgccaccacctccagataatttttgtgtttttagtagagactgggtttcgccatgttggccaggctggtctccaactcctgacctcaggtgatccacccgcctcggcctcccaaagtgctgatattacaggcgtgagccaccgcgcccggccttattaccttttttgacttggacatttttcggtctgattagtttggtttccttgcctgaagcagttacattcattattgttatgctctgaagaaattcctattctttaggcctagcctaccctgaaggtctattggctatgatgttttcagtggtacaagagaccctcaaatagctcatgtaatggatatggcttatagaattgaggtggtccttagaaaagatggcctctgcaacttattagctgtcttagtggccttgggcaagttattccatctttttataacagtttccccagctgtgaatgaaaataataatagaatctaactcatagtgttgttatgagtatgaatgaatattttaaaacacttggaacagtttattatacatagtgggcacaaagttaaaaaaataagttgaaaaatactatttactatattcataatcccccaaaccatgcattttctcttaaccaaaatgtcatgttagaatcatgtgactacatgtgtccacaatagcactttcacagagtttaaatcatttcatctttataagaccctctcaggtgagtaaagatgtattactctatgtttttctaacgagaaactgaggttcatggtgatttggtgagttacccctggtgactcatcttaagtggattaaaggtgaactaaagctaggacttgaacacacatctctagattccttctccagacttcttttttccatcattctgtactatttcttttcaggagttctgttcattcatggtgaggaatctatctaccgctatatgtgttggggtatgattaagatcatgcctgaactgtcttatgagagaaggtggtatgttccagcaatctacttttatctaatctttctgtatattttttgttttccccaaaatgatatattttaagctgtattttggtcatcccaaaaatcaagtaatggcaaaattaaagcaaacaaaaagaatgcattccagtggaggcaagctaagtaaatttttattcggctcaatcagacattgccacctagtggattacttctagatagcagagataagaaaagatttagaggaggcttgaagatataaatgaagaatgctgaaataaatagagaatgaagaaaggggagatttaagacatgggtctgtttaccactttagagtctctagtacccttttaacagctcatcactgaaatgttaccctaggatgtaaactccatgaaggtaaaaatttttctgttctgttgactactgtgtctccagaatctagaacagtacctgccacatagcaggaactcagtgaattaatgtgaaagttgatttcttatatttaaaataaaaagattatttacatttttcctttcactggaaatttttttataattcatatatgaaaacaagtttgtcagagttggttttcttttttgtgcgttatagttttgtaccctagctactattgtaaagttagtatgctaatattgtgtgaaacttaaaacaaatattttattttaaaattgtaatggtttatggaaatattttcatggctattttgttaagtttgcttgcctcttagaaatgagaaagctaatagacatattagtgaagtcaaatttagaagaaactacaaattttaaaaagtatcagggaatagttcattctttctttctttatttttatttatttattttgagacggagtttcactcttgttgcccaggctggagtgcagtggtgtgatctcggctcgctgcagcctccgcctcccttgttcaagcgattctcctgtctcagcctcccaagtagctgggattacaggcgtgtgccaccatgcctggctaattttttttttgtatttttagtagagacagggtttcgccatgttggccaggctggtctcaacctcctgacctcaggtgatcctcctgcctcagcctcccaaagtgctgggattacaggcttaagccaccatgcccggccagttcattctttaaaaatacaattttattttaaagttggacattcattaaaatgactcataattcaagaattgcaaaaaggcatactgtgaaaaatctccctccttatatctgtcttccagctacccaatgcccttcctggaagccaccaaggttatctttccatgtgttcttcctgagacttcttaggtgtttgcctgtttatgagctattactataagtagcaactatacaaattatacctattattctaaagaacaaaatttgatgtaaaacttagagttgtttcaacgatcataatatgctttcagttattaacaaaaatgtcagtcttttttgaatgaaaaataccatttggtatccctttgattatatttaaatgacagttcttattttagctttgtcagttgtttaagttagttttataataaatttgtatttgtatataaattattcacacagattcccagtatgttggttgacagttttactaggtcataaacttccaccatgtcatctcgcgtttccattgccttagtaatttgctgcaatcactacagcaaacaagaaaaacacaattacaggcattttactttcatatcaaatatttatttgcctagtaggccaattttggcttaatttcttaattttgctattaagaaaatggtaaaggaaagtcagatacgtattaatttgagaagccgttcttaaatactcttataagcctaaaactgtgctaggaactgtagaaatcacctaattaacttagaacatttgtgggacaaattctacctagggacacacaataaaaggagctagtgacattaaaaaatttggctctatctgaacacacacagagaagatctaattatttttaaaaaattacagacatgagatcactttcactgctgtacttggttataatgagaagtgatgttattagcatttttcagactctctcaaatgccagaggcattgtgtagaaaattagagtagccatcagtatcatgctgttgaataactgctgtaggattttatttagcatacaaacctctgaaccataactacaatgctagctcagtatttacatttttaaacaaaaagacccaaagtgaaggaatctattgcaaatctgtaaactcttttttgcatgaaaaaatataatttttagttgaggcagcttaaagctcattgatttgttcctgaggcatctattttctcttgatgaaagcacagccgaacagggattctcgtgtcaaagagtatgatttatttatgttctgaatcacagccgctaatgctcacatttctattaaaaacttaacatctatgggagaaagggacaaatactttcaagttcctcatgaggttgttgataagattctggcatttttaaagttgagaaaacacactgaaaaattgtgagaagagtttggctactttagcataaaagttactaaatgcacctttaagatgttcatattcttcctttatactgtactctattaaaatcatatgggtagaagaatagttaatatgagaaaatgttcatgttattttgttgcctaaaaaaggatattaaaaaagaacatttaactatatgaacctaattcggttaaaaagatttatatatcttttcataaaagatacagaaaagatatataggtatatatataaagatatataaatttatgtatttataaaagatatataaatatactacatataaaaagttatatattaaatatattatatataatatacatattaaaaagagtatgaactatatgaacctaattagttaaaaagatatattttttgtatatatacatatatcttttataaatatatctttatatatagatatataaataaaggtatgtaaatatatactaaatatatagaagctatatataattaaaaacatatttagtatatacatatatctctataaatatatctttatataaaaaggatatataaagatatataaaaggatataaatatgtaaatgtaaatatataaatatataaatatatagatatatataaatatatataaaaggatatataaagatatataaaaggatatataaagatatatttataaaaattatatgatctatacacatattgatatatagtacatatatatcttttaaaccatattacatatacatttacgtgtgtatattttttaatgtatgcatggggaaaaactgggaagctgtacatcaaaattttgtcagaagtttgctgtttgcctcagtttcttcatttaaaagttaacataataggacctacttcataaggttgttataaagattaaataaaataatacttataatatttataaaatgcttagaacaatagctggcacaaatgatagctattattgttgttttatttttatgtgtgtttgataaaacttgttttcttttgtttccttattttcctaattttctataatcaacattacttttgtaactgagttatttaaaaaatatattatctacttctaggattctttagttcccaagctctgttatccaaattttagaaggatagataggatcctatcattctcctttgcagcacaaactgatactgcaattaattaattatctgtttgagggttgtcttttccagtaagctgaaagctccactcagtggcgctgtgttgtcttcctgatttttgtttccttgtgcctaatgcttttcctgttccaagtcagtgctcaatatttgtcgagagaatgaaagttaagtttatgttcaaagcaattaatagtcactttgtatttgtgatttagttttatgttttatatctttaaatgatattatgcccattttgtagatgagaaaactgggcaaactcacaacaagcaaggggtgggtcaggatttgaacccaggtagtcttactaaagtgtactgccgcttatgagaaaaatgaggataaatgaccaaagcaatactatataaggaattacatcaataatataggacatatgtgaaatatttattgggattaaaaagatgaaagctaagagaaatgaaactgaatatgtggcacatctagcatgccttatggttgggtttgtgtgtgtacacatatcaaatgcttttcttataatttcgcaaataagtaagttttatttgtatcgactttagtcttatatttatttccttatctttttgtattcctttttcttcataaaatatattaagaaaaaaaattcctctataaattagtcctaacaatatcttttttagagggaggggagcttttaaactaactgcaatctaaagtattatcaacatgaagaagtgctaaatggaacttagttttacttgcccaacatataaatgattaaacttggtaaccatcaatcgcttgcttcttctctgaatatgaaagctgtggtgaacaaggtcttgcttccactctcactccatttttgcagcccttaatctttctttttctttctccagacttttgtgaacaggggcgtggcagagtctaaatatggtaatgaacctctcactctgaaaacagatttaagcaatgagatggggcttcaacagttagctaattcttcttatcctacatcatagatgctaatgtctcaaatgtaaaacttgaaaggcaagtgtattctctgtgagaactctcttgtaataaactgtaagttcttttgcttctttctttcctcctttctaccctccctccctgcctctctccatcccttctttctactgcttgcaaatatgggcagtgtcaataaacaatttactctgaagattgaacaattgctgaaaaaaattagagtggttggagaatcagattcctgttactgatctctttgctgttaattttctctgtggctgttgtgtgatagcggaggaagccttgactgtaagtcataaggtctggatttcagtcctaaactcaatttctgtatggttctgtctccttacctttaaaacagtcgcattagaaatctaaggatctgtttagctctaacgcttctaattttattatatattttactacagatgtgtgtgtgagtgtgtatacaagatgacaatgtcaagattaacagtgtttcacaaaaataatagtaaaatcgagcctacattgtttttcttctttcccctttaccttgttttgctgtaaacatttgggggagagggtaagggtagtgggaagagattactttgagagaatataatttagtttatcttctggcactcttgttaataatttttaattaagaaagcagagttggtattcagtaacaagctttatggatgcaaacttaatttgtatgacagatgtaatttagatgacctcagactaaacaaaatggagatggtttttggtggtccttaattacagaagcctgaggtctattttgcagaatttttcagtccattgaactaatatttatatccagcaaggactaaaaaacacatgtataaaggttatccacatagcaatcaggcattaaatcctttccccttactggacaagcctttcacttattgttccaggagggcctggcatgcatccatttattatggctttttcctaagtcataaatgatatattgtattagctgctttgtaccattctcttgtctatttgttcactatgatcttatccacagactatggtacatgtattttcatttccagttaataagcagaggaagtgaattttgcagttgacagaactgcctaacacaatattttctttaacttgggtaaattaaactatccattaattaggaatttttaaaaatgtaaacagcttacttctttgtgatcaggataataggaagttactattaataatgaatacatgtaatcattgctacagtacataaaagatatccgtaactccaagagtttaggagcttattaaccctaattttgtcttttatgtccatattctcctctgtcccaccccccttccccattgggacctctaaatgggtggatatctagggtttgatgagcaggctagttgtatgcacatgataattggtatgtgattccagggttaaagtttagcatagaaaaaaaatgaaaagattagcttgtttgcaatgaagagagctgaggcagataacagaataaatacatgacttgtagagaatgtaagagggaatgtgagagggagctaatcagtggactgaccttacctttaaggaaaattatctaattcaggtagctctccctctgagagttgattatcttttaggaaaaagtacctttctgaaaaaggcagtgtcatattgacagttgactttcttagaccaagagtgtgataggcaagaatttatatgagttattacaaaatatttaagcaactgtgtatcagttagaatgggctacgttgtgctgtagtaacaaatagcccctaaccttagttgcttacaatcacaaaggtgtatcttttcctcataccacatgtatcttgggttggcaggggctctgctccacattgtcctcatttgaggcagagcttccaccatctggaataatgctgcctggcctggcagtaggaataaacatgacaaaatatgttctgagtgtgaaagagttctccctagaagtgatgcatgttactttggctcacatttcattggccaaagcaagtgtaggaaagggctgtcccatcttgtgcccagaaggaggagaaccagaaatactggtgaattgcacctctcaaaaccaaaaagagtaaataatatttctgactaccatttagtatcaagattttaaaagtaataattaggtgaggaaaaatagacatagtgcctcattacaaaaattatttaataaatcgcagggtcagagctaccttttctgattggtaaccacaagcagtcattctaagaagcggacttgggaatgcatctgtacacatcagttggaggaaccttgacaaaaccgaaaagagtctattaattccacataatccctgcaaaaaaggcttatttcctttgtcactgggtaaaataattcaacacgagtacattgacagacacaggacaccacccctgccaagaattcagttcaacagactccagtttgaaaaatataaccatatagtctttatcatgagtgatggttgtcttataatgcccattttacacatgaggagccgaagctttaagacattatgtcacctttcccaagttacacagctcagaagtgacagagccttgcctagaacccatgttcctctgacatcaaagtgcatgctctcatccatatactctgctaccttgcaacaagactggcacagagaaatacctgaacccggggtggttcaggaaacagtgactgggagagagttagtgtagctgagtcagctggacccaggagaggaggcaatgatcttgtcactctgcaagtaatcatgctcataatcttagtagaacaaagaagttgtttttaaattagtgattttctgggctcaggttccagaaactcagttgcctttcctgaactttgagaggggtttgttgcctttcctcggctttgagaggggcttgttgagcgggagacaggaatatcccagaacacaaacaccagagcctttcgtggaaaggagcccatgtcaacagagtctgcatccccatgcctgcctgtggtggggtggaggatggggtcggctttcaggagctggagcactggggagtgagcaagctgtgatgctgttagcctgccgcctgtcctaagtgcagcccaagtcagagcagaggtgcagatggccagggcttgtgaggattcttgtaaattgaagactgtctataatttgattaaggcgcagacagctaacggatctttaaaggagtgtttaaatcaaatcaccaaacaaggaaggtggaatctggggagaattagaaggcaaacgtggtggtgttctcatcaatcagatgcagctgtccatgcactatttctaacttacaaataaattaagtttatacaggaaactgggagcatatcagatcagctaattttggaattcataagtgtaaaaatctaattttgcttaaaattaactactaaacagtgacaggtacaatgccaagttcttaggcagttgttttgaatccatatacaaccttatgaggtaggtatgataattctattttagaggtaagctgactgaaacctgaagagattatgtaatttccccaaagttataaagctagaaagtagtaatgttcttcaaacatgtgctttcttttaaaatgcacttccttaggtgattgtgctcagtggatcaattattcttttaagttgaagaataacagcttttcttaagatccctactcaacccatattttctagacaacctttgccagttaactctggtatgaagctgatgcagaaacaacaaatcagtatgattttctcttgcatgattcattcttgtgaatgggtattgcatgcttgttgggtccatattttcttcacataatattttattctctttgggggtaggaaccataactaaacagttatttaacccccattattcttaatgttatgcccttcaatgaatagctgattttatgaagcgtagttactttatgattaggctttttatgtcgctcattaagagatgacttatgaccaaaattttaatggaaatctttgctttgggatcctgctatcacctaaggtgcttacaatttgttctgagttatgctacaaaatgactacaattatttacctatatttccataagcttaaagtttggaaaagcgaagcatgcaggcatctggaccaaagctgcagagagaagatgactgaaatttgcacaaatgaaacttacaagtgtattgttttcagaccattagaaggtatatatttaatatagatatatataatagagtttagaacattaatatataaaatgaaaataagtgggtgcagtttctagtaactacccagagagctagggggaagcagcagaaagcatgcagggcaaagactgttccttaggcttgagttcacagccaggtgtttcactaatagctgtgttaccttcagcaatttatataatcactttgaaacttacttaaaaatatttactacatgttgtatgtcatttgtaactgcagtgttcttctttggatgaaatgtgtgttaaacatctagacctaagcatgcatgcagtgaacaatgattactattattactactgaagcccaacacaggctgttttgatgtcagtgaatacagtgcagatgtcatcttttccgtatttctggagaacagattttggcaaataggagaaccttaagatattcattaacctatgacaagatttaaaatatttcgttctacttagtgctctgagcactcttccctccttgacccctgccattttgtaatatgcgcttcctaatgtatacatgcaaacccacaattatcactttcttcatttttctgttcaaattagaaatcagagtagggaaagatgggagatggacaaaagtgtttgtaggttgtgggtaatttctcgcagaggatcaggtctgtgccatctgtcatggatacctgggcattagcagtctgtaaggctgcttgaggggctggcagctgccttgcctatttacaaaaaaaacagcactttggagaagccatatgtatatatatgattccaagttatatcttgaacatgtctgctttctacatatcattcatttgtgagagttgatataacattttaactgtttggattaaagttgaacatgttttttttttatgtttggataatgaaaagtaacagaaattggtaattaaagctgggtgggccctgatgaaggaagagacagacagatcaatgagccagaacagaatccggaaggaaattcaattacatcataaatgagtaactgccctgattcaatgaaggggttgcacacagaaaactttttattttccctcaacatttcattcaaacaagctctgccatctctttttcctggccctggctatcatctcaagtcatcttatagcttttaaatccctgtttttggtaatcaaatggtctcattttcagatattaaaaagtctaggccatatatatcaaaacgttattgttatatgcagtttaatggctttgtctcctttcagctcaggtctgacctatgattgcctctgccccatattctccttgtttttagatgtttagactttctatggttgagggaatgaggctagtgagtagagagatagaggcaaaggcattttcacctattgcttttggtgctttcctggctatcaaatgtcctcttcatctcaggccttcagatgctgcctcttctctgatgccactggagttctttgaagatctcccctgggatttctcctattaactttcagagtccccctcacccctgagcttttaccctaggaggtacagctccagccatttactgttggggtccttttgcaccagcaggcagcagtgttcttgggctgtgcctgtcaagtgaagatgacataagcctagatatctgcttgaattgtttcgctgatttcatcttgaaagaaggggctggtatctctccaggtaagtaaaacttgcaaacatctccaaagtggttcacttggtcccttcttttcctgcatggcttcacttaggaaaaacaccaataaagcattctcttcctaaaattttctgtaaataaactgtcctcttaaggagtctataagcttttctaatatgggataggtgtttagaatatgttcagtagctgggttttgtaatcttttaattgctgtggagatgatggatctattgattatttttggaactaatgtggatgctactgacttgttaactcagtttggggcctcagcttaaattctgagccaacacaaaagagtttaattccacattctttttcaaatgtaatcaaacatgttggggaaatatctctgtaaatgacattggaatatcttgctaaccatttagaacaaaaataattgatctctatttgggtaccacacacaaaaataaatctgagatggattaaagattaaaatgacaaaactgctagtaaaacaagatattgtcatcttggtctggaataagcctttctaaatttgatgccaaaggtaagaaacaaacaggaaaaagaatgcccaattagcattcgtaacaattaaaaagtttcacatggcatgcacacaacacaaaagacaaattttatagtggagaaataatttgcaaaaagggttactattctcaatatataatgagatatcattaagaaaaatataaatatgagaaaaatgaaggaatttagaagtaggcaactcaaaagagaagaaatgcagttgatcaataaacataattagatgttcagtcttgcaaataattcacttttttggtctgcttggaatgctttccccttttcttcacaatttttgtaaacctgattccttttcacaagggtcttcagtctaatgtccctcatctctgtaactccatgcttcacttcttacctgcctctctctatttgaatataagctttttgaggtcagatacctaatctatgccttttttcccccagtgcctatttagtgcttggccatagtagactctcaaatgtttgttgagtaaatgtgtaaataaatgaaggaactgatagaacgtaaatggaaacaattacatacagtattttcctattgtattaagaaaggttaaaaagtaaggctgggtgcggtggctcacgcccgtaatcccagcactttgggaggctgaggtgggcggatcatgaggtcaggagatcgagaccatcctggctaacacagtgaaaccctgtctctactaaaaatacaaaaaattagcctggcatggtggcatgcacctgtagccccagctactcaggaggctgaggcaggagaatcacttgaacctgggaggtggaggttgcagtgagccgagatcatgccactgcactccagcctgggtgacagagcgagactctgtctcaaaaagaaaaaaaaaaaaaagaaaaaaagaaaggttaaaaaataaaaatacctagcatgagtgaaataacgtattatcattcttggaggtaaaaattagcacagtatttcggtaggaaaatttggcaagttgaatcaaattttaaaatgtgtgcctcggccgggcgcggtggctcacgcctgtaatcccagcactttgggaggccgaagcgggcggatcacgaggtcaggagatcgagaccatcccggctaaaacggtgaaaccccgtctctactaaaaatacaaaaaattagccgggcgtagtggcgggcgcctgtagtcccagctacttgggaggctgaggcaggagaatggcgtgaacccgggaggcggagcttgcagtgagccgagatcccgccactgcactccagcctgggcgacagagcgagcctccgtctcaaaaaaaaaaaaaaaaaaaaaaaaatgtgtgcctctttgacagtaatttaatgcttggaagtttatcctaagaaaattactgaactaatgtacagagatacatttggttgtgtaacaaagtattgtttatgatagggaaaaattactagcaaatgagatgttcattgataatcaggaaattgatattttgtaaaacattcaaacaaatgaatatacttagttgttaaaaatgatgttatagatctgtgtttattgacataaaaaggtatttgtgatataggagaaaaaaattatactgagcaggagttattttgataactagctggtataaaaaaggtttttaaaaagatcataatttccttttccagtgttatttaatgattcaaatgaaaagaaaacagttgaagtaatttctttgtaaattccttttccttctaatttgtttttctgattattttcttcattcttgttactgccacctagtggatgatgattggtttgcttttttattgttcgagattatggtttattttttccccgaaggtagctctttctaagggtttaaaaaaaaaatcaccagtggtgtgctagtaaacattttacttccagctatccaaaggcattgtgtacataagtatacattcataaacttctaataagctttacttataaaggatgcacacaatttatgtagagggagcacatattttacgagtaataagaaaacagaaaatactctttatttaaattataaatagctaattgattataacaaattgctttcattgctttttgctgaactcctgtatctgtagcaaacctgtggctgcagttcaaccatgatttgacacatggagctgtatgccaatttattaaccctttaccaaatatcattaaatctgacgtgtgatgtaccattggactatttctcaccattgtacaaattatcttcattgaactcaaatctctttcagctttagcactaaaccaaacccttctttatagtgcttgtaactttatgttatgcaaatattcccactaacgttgatgtcaatctaccaatgtgaaaacacagaacctggatttggggacagatgcacagtagcactccattatgtagtattttcactttgcatatgtgatagacataatagcttcaaagcatagataacggtaaaatgtagtaaatgtagtaaaataaatagggagtgatgtttaaaatgtatatttcactatttttaatataacttgtttgactataagtttatataacttaactattaaaactggcttgcaaaattgaaaatttaacagttggctttcacaatcttgcatgagcaaatgccacaccactgaatatagctgttatctttgctttttgagttgtctttattgttctggggaagctgcagagccatgaaagagaccattctttgagctctaatttgtatctgagcagcatattatgacatgttttattgttatctgtcgttggtacatgttaaggaagagtaataccatgatgtaatcctactcttccttaacatgtgtgttttaagcctttgagcatctttttaaataaaaggatgaacatgtgaaatatatatgcaaagttctaaattattgagcaaaattattatcatacaattacttcaactaaaatatctcttagagatacttttataaaataatccagaaggatttaccttttaatatgcttcctcatattgtctcatctgaccctcctacaaatctgtaaggggcatattattattttcatcttacaggttaggaaatggggaaacagagaggtaaagtgacttgaccaagtcaagagagattaggagattatattagtaatgataataacagcagcaacagcatcactacagaaattgttgacaaagtacccaggatatgccaagcactattctaaatacactgcggttattgtttcatttaatcccatgaaacataccataaatctccacttttcaagtaagaaacccagaccagagaggtagagcaatttgctcaaggttacataagtggggacactggggttcaaagccagatatatctgattccagaacttaactcccagaggcactataatctcctgcctctcattattaatctggatttccactatattctgcattcacagatgcaggtctagaaatgcagtttaagtttatccattgtttaggcaagcataatttatagcttgaatattgtaaaaataattattcatgtttctattttgcatagttctagaaggaaataaagttctgttttaaggtgtttgcttctgtgcaagatgcacaggccagagtctcttatgacattcgaagtagggagatgttaatgatgaggacagccctgcctattgttcccaagtctccagagacttccaaggcttccagtccttacacaattgttgggagaatcccattacttgtttgtggagaggattacatacgtttggtttgcattaattgcagagctttgccgttagcattactcatatgagactctttcagatagttattaatttccatttaaggaaattaaacttttgacattctctagaggtctaattattgactggctgtttcctgactctactctggcagaggtagttcttttgccttgtcggcactaaatcttgactcctgaattttgacgaggattattaccaggtgcttggtggtttaataagcatctcatatatggtgaaaataaacaaaccagtcatagagattttattgacattgtgcaaaaatcccagtttttcagttttttaggcagttgaagtcacataaacagattatttatttatttatttcttctctgtctccccccgcccccgtctttctttcttataaatgtaaaggcagaaaaaaaagaatttagaatatatgatagactggtactttatagactcagaaaaatgcagaactatttctattttaaactcaaacaagattttagtacctaatggtcatcactgtgtgaacaatttaatccctttttcatagaattaaatttgccagtggatattgttgtcccacccctgtatccttccctttcttcttcctttgtcccttcatttctcctcccctcccctcccatccctccctccctcccttccttccttccttccttgcttccttcctaccttccttccttccttttcaataacatgtcagtcctggtattagttccctctacagagttagcagggcaaaaagctctttcattaagttattttctgaaccaaggcaagatgttatttggactctatttataccatttactgtttgtggaaacaatgagataagtatttaatgaaaaggattgtgcagcagaaatgtgacagctcatatccattacatagttcgagtataagcacactactacaaactctaaattgttagacagatggtggcttttgggcttcattcaacagaaaatagcactaattctctaaactagcaattcctgggttttactactcattgatttcttaatagatttaattttatttcaccattaaccaacacttatttctaaataaataagaatagcaaaatataaatatattctttgacaaggtctttttaaattagaaaagttttggttttagaaatggcaaagttcagagaattatctggtagtctctccattttgtagtaatcatcatacagtattataaatggagtttgcttgctgatataagtgtaaactggaataatacttttggaaaataatttggaaatatatattaaaagcatgaaaaaatatacaggcaataatcaacatctatgaatcagttatagggaaataatgccaaatttgtaaaaaactgcatgaccaaatatgtttgttattgtaaaatatgtacatctttggcaagaggtgtacagttagagtaactatgcccacattacaactatgttaacaagaggcaataaaatggaaatgacaatgtaagtgaaaaataggatgaaaattattctttgatataaatcacataaagttcatgaaaaacaagctacagcttaaactatttgtggaagaaaatattcaatatgctaatagttgctgtgatctacatactttttatcttttttaatttaaaaaggtcaattattacttttataataaaaatatgaaaaataataagtgacattgcagaccaaaaactagacatcaaagtaacctaggcctaaggattgcaaaaatcatcttttacttctagtataattaaagattatgctcgaggcaaaagtgttaatagtgaaaagactagaacttttgagattatatagtctaaatttccatttggcatgtagatatgagagcgttaatagtaatgaagactaacaccttagccttttaattctcagttcaaaatcttttaaaccataaaacattttattgtttaaaaaaggttgtttttttttttaaatgaatgtgaatttattgtggacttgattgcttaaagaactgtcagtttacacccgggtattcagaaagcctaatatgatgggattctagtctacagtgtcatgaatgttacttattgaaaacaaatatgctatatgttgtaatatgccaggaataataaaatgttatgcatataattaccaatatttatgtgctaatctttgataattagtagggttagggagagaaggtaaaatgaaggattagtatccctattttggaagcttgtatggatgtcatcttgttttctaaacaaattttcttatagcaagtatagggattcatttattcacttatttaatgcgtgcttatcaatcacctactatgtgccagttactgtgcttactgccaggaagtaatggtaaccaaaaccacaaaaatcattaaagtaatttcttttctgctcttgcccctgaggtgagacatcacattttatacagtagtcccctctgattcttgggaatatatttcaagatccccaggggatgcctgaaacctcagatagtaccaaccaattgccatctacctgtgcaaacagagcacatttctgtttgccttttacctacaaatttaatgtcttctacctacaaatttaatgtctttttcatcttaactaagcacttatcatgcactatggctgtaagtttttgcaggttgaggtacgacagcacaactagcacaaatttcattttccttcttcacaattccatggatagaacatttatagatcttagcaatctcagcatatgatttttttttccttctttaagttgagaactttcaccttttcacttaaaggaagcactctacagcttctctttgtcacacctgaattgccagcatcactacgcttgtgctttgtggtcgctattaggtaaaataagtgtgacttgaaaagaagcactgccacatccaacagtcgatctgataatggagaaggcttctaagtgactagtgggcgggcagcatagacagcgtggatctgctggacaaaaggataattcatgtcctaagcagcatgagatttcatcacactactcaaaatggcacgcagtttaaaacttatgaattatttatttctttccacttaatgttttcagaacttgattgattgatggtaataaatcacagaagtgaaacttcggataagggagaccactgtaaatattgggcatccctaaaagattcgttagaaatgatccctaagtcactagtccctggggtcctgatgcagaaactgaaactgaatgaagagaatgaagtgggtaaagatgttaagtgttctgggtattaattcaacttaatgtaaggttagggaggtaggcactacctctactatgtattatatgatttttttattgacgttgtctcttaaattattgtatcctctaaattatctgcactattgctcttgtttttttttttttttttttttttttaattgatcattcttgggtgtttctcgcagagggggatttggcagggtcataggacaatagtggagggaaggtcagcagataaacaagtgaacaaaggtctctggttttcctaggcagaggaccctgcggccttccgcagtgtttgtgtccctgggtacttgagattagggagtggtgatgactcttaacgagcatgctgccttcaagcatctgtttaacaaagcacatcttgcaccacccttaatccatttaaccctgagtggacacagcacatgtttcagagagcacagggttaggggtaagatcacagatcaacaggatcacaaggcagaagaatttttcttagtacagaacaaaatgaaaagtctcccatgtctacttctttctacacatacacagcaaccatccgatttctcaatcttttccccgcctttcccccctttctattccacaaaaccaccattgtcatcatggcccgttctcaatgagctgttgggtacacctcccagacggggtggtggccgggcagaagggctcctcacttcccagtaggggcggccgggcagaggcgcccctcacctcccggacggggcggctggccgggcggggggctgacccccccacctccctcccggacggggcggctggctgggcggggggctgacccccccacctccctcccggacggggtggctgccgggcggagacgctcctcacttcccagacggggtggctgccgggcggaggggctcctcacttctcagacggggcggctgccgggcggaggggctcctcacttctcagacggggcggttgccaggcagagggtctcctcacttctcagacggggcagccgggcagagatgctcctcacctcccagacggggtcgcggccaggtagaggcgctcctcacatcccagacggggcggcggggcagaggcgctccccacgtctcagacgatgggcggcggggcagagacgctcctcacttcctagatgggttggtggccgggaagaggcgctcctcacttcctagatgggatggcggccgggcagagacgctcctcactttccagactgggcagccaggcagaggggctcctcacgtcccagacgatgggcggccaggcagagaggctcctcacttcccagacggggtggcggccgggcagaggctgcaatctcggcactttggaggccaaggcaggcggctgggaggtggaggttgtagcgagccgagatcacgccattgcactccagcctgggcaccattgagcactgagtgaaccagactccatctgcaatcccggcacctcgggaggccgaggctggcggatcactcgcggttaggagctggagaccagcccggccaacacagcgaaaccccatctccaccaaaaaaatacgaaaaacagccaggcgtggcggcgtgcgcctgcaatcgcaggcactcggcaggctgaggcaggagaatcaggcagggaggctgcagcgagccgagatggcagcagtacagtccagcttcggctcggcatcagagggagaccttggaaagagagggagagggagaccgtggggagagggagaggggggagagggagagggagagggagagggctgctcttgttttaaagatttaatactgcatgttaatcaattttttgttaccctttttgagttgactctacctgaataccatgttatgatgcattattaagatatggaccaaatgtttattccttctcaatgataatgattgtcttttgaaatttgaaatcttaaaaaaatctattttgggggtacaagagaagatttctttttctttttttttggtgatgaagccttgctcttatcccccaggctggagtgcgatggcatgatcttggctcactgcaacttccgcctcctgggttccagcaattctcctgcctcagcctcctgagtagctgggattacaggtgcccgccaccacgcccggctgattttttgtatttttagtagaggcggggtttcaccatgttggccaggctggtcttgaactcctgacctcaggtgatccgcccgcctcggcctcccaaagtgctgggattacacacgtgagccaccgcgcctggccaacagcagatttattatatgcttatattgggtagtggcataaagtctgggcttttagtgtactcatcactggaatagtgaacattgtatccaatagataagacaggttatcttgttggggaaaaaaaaagattgaaaatgcagagtggaaccttaacccttaatgaagcagattttttttgaaaacaagaacaaaaacaaaacaggctccattataaggtgtgttattttctgaatgaagcagtgcctgctttcttcctctctcccgcagataaaagggtgctccttgggctttaaaaattattttaaaatttgtgatgctttaatcaatgtttgcctaattgaattgatgtaaagattaaaaagtgaaggtttgggaactttgtgaataggttatgggaaacactcacatgtgataggtaggtatataatataatagtttattttacttgagatactctcttcctgtattataactgccttttatgaccagaattcctaccttaaatgtattgatgtgtaggaatatatgtatactcaaattttcatgtttataaatagtggtgcttctatggaagtcttggcagtaagattaaagagtggaagtacaagaaatgtgagctaatagaccttaagaagattgagagaattgtcaagcccagctccagacacttgttgggcccatgaggagtatttttttgtcagccaaatttgagaaactcccttcttgaaatctgcctcggaactgtccacaatgacaaaacgctcctgcaatccagaggccaaggcttagcctaattgaatgttaagcagctgaaagagtttgaaaccagaaaaagtgtacatagtggaaatcctgatgagcccatcattgtggtggtctcctgtggtggcaatgataataataataatttatttaaaatagccaaggtagagacaaaagtttttgtgtattcaagccaaacaactcagatgaatggcaccccccagactaacttctgagtaaaccatactgtgataacgtaaagcccatctgtgtcaggaatatcgggaggtgccattaggctggaggacctgcatatattcatatattgtccacaaccttcttttggggtctggttgtctagatgggatgactctagatgacatgtatgcagggtggattctaaaccagaggtagagcagcattagtgtctgcctttttttttttttaaatcttgtggtacctaatttccaaagccactcaaaatgacaaacataagtgatctgattattataccagacgcatataaaaagtttctatttccttacaaagtttttctggctctcaaatgtaatcgctgttttgtttttctgttgctgtttgttttaaagaatcagaacaagaacttcccttattttaaaataaactattagtctccgacttcaggcacatcacaatgtcccaaattagattgtatttaattcaagacgaaaattaaattgagttaaaatagatgaactctgctttcttaataaatttattctttaaaatgataaattagtgataatccttaacattaactattttattttaccatcattttcctcaactacagcgttttcatagtaataagataatttattttatatattggcttgtcaagtttcctcatctgcctttcccctttttaccttcatgacatccctatgaggatattgagagatagcatcattactccaattttacagataaaacccaggtttagaagagttatttgttttttcataaggcttgaatcagatactttacaaataatcagacttgtaaggtatttacagtactcaatttccatgtcattcttgtgtagcaattttagtttttaaactatattaaaaattctttagtttttgtaaactatctaaataactgttttttttttttttgaaactggtgggcttaatagagacaaataggttacagacaaaattccattataaaaatatcactgcagaagagctcaataagaaaagctatttccttgtccgggtggacagcctatagaaagtgtctgatctagctgcagtgatttctgtgggaagaaagcatctctggattaagaaaaatatcagtgtaacaataacaacataactattgaatgctactctcattataggtaggaaaaggagaatataaggtattttttttagttatgtgtagagtaacaattatttattgtttctatctcagaaataactactaaagagaacctttctttatttcaaaattgcccaaacaaagctacataaataaagattctgaatataggacagaatatttttctgaaagaaaaagtgtgtgtttaataaattcctcatttctttaatgtgttttaaataccttagattaaaatatactacagaccaggacttgactttaacgtgcataccatgggtggagaataccatttgctttttgcagattatgacttatatgaacagaataaaagcatgctacatttcccccattgtgtttagggctgttggaccatgtgtcaatggtccacttttagttagcagttttctctccctttaaattattgtgttgaagatcttcagatgaaaattgctaatatgactataatgaccagagctgagtttgtgagaagtcaaaataattacagtggttctcaaccctgtctgcccattataatgacttgaaaacctctaaaatataatgatacttggattccaaagattctaatttaatttgtttgattctaatttgatttgtttaatttgtttgggatggggcctgggcctaggaatttttccaagtttccaaaggatctacaatgtgcagccagagttaagaatctctaatctagtctgtggtcttcaaactttggttacttttagagaatgggaatttatttgtttctattaatttttgtctttgtttttccaacttttattttagataacacatgcaggtttgttatgtggatatattgcactcagctgtgaggatagtactcaattggttaatttttcaacccatacttccctctctctaccctctagtagtctgcagtgtctattgttcccgtgtctatgtccatgagtagtcaatgtttagctctcacttataagtgagaacatgcagtagttgattttctttgcctatgctgattcacttaggattatgggctccatctccatccatgttgctacaagggacatgatgttattctttttatatctgtgaagtattccatggtgtatatgtaccacattttctttatccaatccactgttgatggccacctaggttgactccatatctttgctattgtgaatagtgcagccatgaacataaaagtgcatgtatctttttggtatactgatctattttcctttgggtatgtacccagtaatgggattgctgggttgaatattagctctgttttaagtccttttagaaatctccaaactgctctctacagtgtctaaactaatccatattcccactaacagcgcataagtgttcaatgggaatttattaagaaaacatatgcttaagccctaccaccaagcctaataagtcagaagctatagggagaggactttagtatctgtgtttttaaaagcttttaagaatcactgacttatggcaagagtagaatgacatgatttcattaaaccttaattagagttaaattttggtatggagccattcagctgtataagggaaattattttctctgggaatctccagtagattcctgctaatcatttgtgtgatcaagtgttatatttatttatatctcagattttttcagctaatacatgaatatttactgattatatactttttccatcacttaatttttgaaatactgcttaatagtcaattatttagaagaaatatttaaatagatggtgacatgttcctttagattcagttagttctgaccccattgtcgtggtgatatggttcagccttctaagtgatttcaagcttttcccttctctgaaagcaatatgagaatgtattttgatataattctttctctttcaaagccaagtgtgtttccaaatacttgttggtttttcttggttgactcttaatttttaatgatcttgatgatactaaagccatttacacctttagagcttaataatgtacaaggcaaaaacattcttttctgggaactcaatctgtttcatgcatctattattgcctaccaacctctaatagtcaaaacagcatagcatcaaaggtaattacagctcttaggttgagtgggtttggtaagattacttagattgtagtcattcttgaaattacagaaataatttattggttcaaaattttgataagtaaaaataatccatggaccacagtagagtagctcttggacagtagcacgtgtcttgagaaggggcagactgaattttttttccaagtgaatcactatttctcttcatgatatttttcagtcttgatgggtgcttctataaaatgggaataataaagcatttgctaaattcttacatagttccttcagggaaaaatataggttataataatattgataaaatataaacgctgaaccaagtctctataaaatgtaattatttgtaagaatgagacaattataattcaaaacatctaacattattttgaaacacaaagtggaaatttaataaaaataacaccaacatactaagagaatttatttctattatttacggtagccaactatttatagttactgagtcctgtagccacttccatgattgtatatagtcatacattatgttaatggttacattttattattatttgactatatccctattattgaattcttatgttatttataataaaacatgactttttcaatttttaccaccctattatttccagatgatatttcctttttaaaatttttaaggttttaaaattttttgtgggtacataggtggtgtgtacatttatggggcacacgagatactttgatacaggcatgcagtaagcaataatcacatcatgaaaagtgaggcatctatcccctcaagcgtttatcctttgtgtcacaaacaatccaaatatactcttttagttctttaaaaatatacaattaaattattttttgtacccattaaccatccccacttcccccaccctcacccccactacccttcccagctgctggtaacaattcttctactctctgtctccatgagttccactgttttgatttttaacatccacaaataagtgagcacctgaaaagtttgtctttctgtgtatgacatttcacttagcataatgacctccagttccatccaggttgttgcaaatgactgaatctcattcttttttatggctgcgtagtactcctttttgtatatgtaccacattttcttttcttttttctttttttttttttttgagacagagtctcgctctgttgcccaggctggagtgcagtggcacatctcagctcactgcaacctccaccttccaggttcacgccattctcctgcctcagcctaccgagtagctgggactacaggcgcccgccaccacgcctggctaattttttgtatttttagtagagacggggtttcactgtgttagccaggatggtctcgatctcatgacctcgtgatctgcctgcctcagcctcccaaagtgctggtattacaggcgtgagccaccgcgcccggccatgtaccacattttctttgtccattaatctgttgattgacacttaggttgcttccaaatcttggctattgtgaacagtaccgtaacaaacaccagagagcagatatctcttcaatacactgatttcctttctttgggggtatatacccagcagtggggttgctggatcatatggtaactctagttttaattttttgaggaacctccaaactattttccatagtgattatacaaatttacatttttgtcaatagtatattaagattcccttttctccacatccttgctagcgtttgtcattgcctctcttttggataaaaaccattttaacctgggtgagagtatatctcattgtagtttcgatttgcatttctctgatgatcaatgatgttgcacaccttttcatatgcctgtttgccatttgtatgtcttcttttgagaaatgtctattcaattattttgtctattttaaaatcagatgattagatttttttttcctatagagttgtttgagctccttgtatattctggttattaatctcttgtaaggtaagtagtttgcaaatattttctcccgtcctgtggattgtctcttcactttgttgattgtttttaacttgacgtgattccatttggttgcctgtatttgtggggcattagtcaaaaaattttgctcagaccaatgtcctggaaagtttctccagtgttttcttatagtagttttgtagtatgaggtctgagatttaagcctttaatctactttgaattgattttcatatatggtgagagatagggatcaagtttcattcttctgcatattgatatccagttttcccagcaacatttattaaagagactgtcatttctttaatatatgttcttggcacctttgttgaaaatgaattcactgtaggtgtatgaatttgtttttgggttctctattctcgatgatatttcgaatcacattctgattggttataatattctggttatagcaaacaatgtaattctatattctaactattttatgtattttatattataagaatacttattgcctgattttataaaattataaaataattttttaatagaaacaaatgttgcaagacataaaagtattttaatgatacttttaaatttagaaaaacttaatttaacatatttaaataaggctatattttcacattgttaggtgtagaactttaaaaaatctaaatctataaacatcttcaattataataatttaacaatctgcatcaattaggattcaaactacttcagaaagaaactatgacatgtttccttttctttgtgaacatttatactataaatccaaattacattataaatgtttgattaaattgatatcttctaacactcgtaaaagattatatctcattaaaaaattgaaatatactaaaataattcttgtttatgcaattcgagcataactcttttaatatatatatttttcattataaaagtaattcataatactagcagaacatttagaaaattatttgcattaatcatggtaaatactgttaatgttttgtttttctttccagttcttttcaaatgagtaagtgtgtgtgtgtgtatacacatactttttaaaagcaatttaaaatcatatataaaaattaatcttttaacttaattctataataagagtttcttcacgtttgtaactgttctcagaaagtattcctttatcagtgtcacttttttttccattttaagtagtgttatggtgaacatttttgtacctagaatagatttttagagaattaaaggtgtctatatttagatatcacaaccataatcatatgtaagatcatggatatagaaaagatattctatataagcctttttaaaacctattaggaagttgttttaaatgttaaaaaaatcttgatctatgatgtttgattgacaatgcataaaatgctgttaaatcttattaaatatggtattactccttctgaccctctcctttcagaatggtcaaatctcattttcagcttgagcgagcactgtcaataaatgtaagaaagcttgatgagggccttggggggagcatgtcaagcaaattgctggttcctttggtataagagtgattttggggtgtccttaggacacattaagcagttcagagtagtaggagaaaatatattctctatagagaatttagaaattttctcagttgatcccttgatgaaataaatccttattaatttttaatcctgaaatatgatggtgttgtactgagttccaagtaaagaagtaaatgtagtgtcatctgcaccattgaggagggtgcgatttgtgagactgtgtatatgatcttggctcccccttggcaggcataaagactggattagctcttgtgccttcctggggctggaagccaaaagtcaagattaaactaatctaaatctttccttttacaagtgagcaaaatgatgctgaaggaagttaaactactttcccaagttacataatcatgtgccagagctgaaacttgcagcggcagagcccagcgtaataaccttttccctcaccaccatttagtttagagcttcagaagtatttttccattgttcgataatcaaaatagtaacttaaatgataaaaatggcccattgttatctggcttttatcttttaaaaaaatctgtgaaaagggttactgaaatgatgtatacttttccaaaggtgtgaaaacaaagttatcagaggtgtagcaaaaatttgtagtaagtcaaaagcgttaaatgattgaatgtcttctttaaaaaaatcctgtcaaatccgtatatttttgatgttatatcagtttttattttagctggatccttcatttttagctctttaatcacactcagacagatcttgaatgcaaaattgttagtgtgggtggcagaaacagagagatagcagcttgcttattttaatatttaatcatttcccctctcagcttgagttgaaaagacaaaaagcctgtgaatatatcaaggaagactgtggaatccatcgtccttcataaagaaaaatctcctgattgacccatttcatataccatacagacatcttttttcctggtatttgatagttgattacttccactagttggtaaaattagatgatttttatgttttttcccccaacctctcaccttttttattccagggagatttgcccaatcatggaatgtgtaactttcagaagcattgaactttttttcaattgcttattcatttgaaggactttccaatgaaccattaattattagcaggttagtataattcttgaactgagatctgtattacttactgcacagggttcaaagaggtggtggtaccgctgaataatgttcagatgcattgatcttcgcagccacagactttctttcagatgttgggtctctggctcggacatctgtcactccccatggaccaggcccgtccaaccagctggacagtgccatttcccatctcatctcacctatgccacacccttggctgaagatgatggccatcccagagaaaagagccagtctttggttgaagaatgaattgttcatggaactctgggccagattttttcttccagttgtctctggtaaatttatcctgccaccaaaattaagaataaaggggtgaggatgtagggtttttgcaaaggcacattccctgtagaatcattgctttttgtttttttttctctttctcccttctcttttcccacattgtgactgctgttgcccatagcaaccaccattataacattcacagcagcttttactacaatgtgagggaatcccaaattagaaattatttgccatttctatatagggacacaattcttcattatttaatgaacttagcatagggttaaatcattgaacagtctgttctggagaatttaatatttttacttgccctatagttgttcatttctctacttatactgattttattgattgtttataccattttaatttggtaatagatccctagagaaacaaggtctttttgtgtcttggcctcagattcatccccaaagtctcagttcagagtgactcacttccttactaaaaattacacatcagaattattcagctagccctgtgtatagtccagtaactatgctgagggccttgtatatgttgtctaatcctcaacataattttgcaaggtagatgttattacctatattctactgatgagaacactgaggttctaggaggtattttccaaaggctttatttatagttaatgaatgatggtatctaaacccttcagaccctaggcactggagctctttttgaatccacactaactctgttaataagaattacttgcagttccacttagttttaaagcccatagatattccctgaacactctttttcctggatttgcaacatctcgtttctcttgaggaagagtctgccatttgctgactacctatctacaggcattcatgtaggttggcctagtccgcaattttcccttacttccaaatttctctctttagtttttatcttccgccttcctctctgatttatgccattggcttccccccggactttaatgttgacaccttttgctgcttctacaagttcagactctccagggaaggcttaaagaaaatgaagactagggaggaaaagagtgaaaagggggaagaggtggttgtgttctgagcttgagaccaatgctccgaagtggcagaataggaattggatagcatggaggagaaaaactcaagcaaaccatatctagccagtttttcaaaatattttaggatatcttgtttatagaatattcattcttacatctaacccaaatttgtgctgtagagtgagccaatatcttcttgttctgtccgtggtagatatggataacagttattcagcaatctccttttatatttgataatatgtattatattttctcatatgtaagctgagctctgtaggagtactttagtctcactagtgaaaagcatgaaaagactaatatctaattccaaacagtttttgatgcaggcccctgtcatatatattgttttatgtaacaatactgttaatctagagacatataattttattattttttttttttgagacggagtctcactctgtcgtccaggctggagtgcgatggtgctatctcggctcactgcaaccgccgcctcccaggttcaagcaattctcctacctcagcctcccaagtagctgggattacaggcgcctgccaccacaccagtttaatttttttgtatttttagtagagacggggtttcaccatgttggccaggctgatctcgaactctgcctgcctcggcctcccaatgtgctgggattacaggcatgagccaccatgcctggcaagacatataaatttaagagtaacatatttgtttggtgctgtcacatacatgctcatatatgtaatttcattttaactaattaattaattaattaattattttaaagatgtagtctcattccatcacccaggctggagtgcagtggtgcaatcttggctcactgcaacctctgcctcccggcttcaagcaattctcctgcctcagcctcccgagtagctgggattacaggtgtgcaccaccatgcccagctaatttttgtattttttagtagagattgggtttcatcatattggccaggcttgtctcgagctcctgaccttgtaatctgcctgcttcttttaatttatttctacataggtttattctacaaatgtttcagggcagcttataactatatatacacatatatatctatatctatttaatggtggggagagtgggtagattttggtcaaaagtacaaaatttcagttagacagatgaagaagttcaagggatctagaacttgtagaatatgatgcttatagctaataacgatgtattgtatacttgaaaatcaggaaaatagtagattttaagtgtcccactaaaaaaatgataagtatatgtggtaatgcatatgtcaattagcttgatttagccattccacaatgcataatatttcaaaacatcatgttgcacatcataaatatatacaatttttattcatcaattaaaaattaatttaaaatacaggtaaaaggggaaaatataaatgggaaataaaaatcatgattacataaaatatcttaaagaatacttttaaaaagggaaaaagctgactcatgaaaatttaaaatgaacacgtcacaaattttatttattttattaattgatgaggaaccagcaaaatgttaaaaactggtccaaagagcacttgatttgtattagatttattgcaacttattattgctgaattagatgtaaaattggttaatgcccaacagagccataaagcataccttaggttccagcagacagactttattcgcatttctactgcaaaaaatctacaaggtaacctctgtcccaactgagttgtaaacagccactaagtaaaagttaagcccagcactgcactaaaagcatacctagtaatctcatttgcctatttccgagattcagacaatttttctgagaaataatacaaaattagtgtgaggaaccaagaccaatatggaaaatagaacataagtacgtaggctataagggcatattgtaattgctgtttgaaaagtgttgtgaattttctggcaggcaaagtgaatagaatatataaaaggctagaagtctttatggttggaaagaagaaatacattggttcctttgttggaaagaagaaatacattggttccttcagcaaaggaacattttttcttttaagagaaagacaagtttatcttgaggagcttcatattgggggtggagggacagggacttggaattacacacgccatggtcctcaaaaacagccttctggcaggtgcagtaacagatgtcatagggctatttcctcaacgtaccctatgatgaaagactcagacataacattaaaatccacccagggaaaatgattccagtgaggcaatggtagagtgagaaaaaagtgagcacaagataattatctgactttaagatgcacctacttgaaccatctctggcaattattcattatcaaagagatgtacaagaatcactcaaggattggtgggccccttttacaattctgccaagggtagtgttaagggaggaggagtggtcttgcaagggcaagaaaaataaattgatatttaaaatgtatgtagcatagtgcttggtataaagtcagtgtccaatagactgtagatgctattgtgatcactgtaattattattattttttattttactttaacttccaggatacatgtacagaatgtgcaggtttgttacataggtctacatgtgccatggtggtttgccacacctatcaaccaatcatctaggttttaagccctgcatgcattaggtatttgtcctaatgctctccctccctttgcccctcacccctcaacaggccccggtgtgtgatgttcccttccctgtgtccatgtgatcactgcaattactactgttattatgtaaaattttctgtgcttcttagacatctacgtttggatgtcaggtagactgaagtttagaggagaccctgggcctggtggtaagtgtttgggagttgtcagtgtacaggtgttatgttaagctgcgggagggcctgggtgagaaggtttaagaggtgcccacgtacacgggacgttacatatagcaaatatggggtgtgatagtaatctaacacccttccacaaatataatttcctcaacaagactttttccagaaaaagaagtcattatttgaaaaagacacatgcacacacatgtttatagcagcacaatttgcaactgcaaagatatggaaccaacttgagtgtccattgaccaacgagtggataaagaaaacatggtatatatataccatggaatactactcagccataaaaataaatgaaacaatgtcttttgcagcaacttggatggagctggaggccattattctaagtgaagccattcaggaatggaaaaccaaatagtgtatgttctcacttatgagtgggagctaagctatgaggatgcaaaggcataagagtgacataatgggctttaggggcttgaggggtaaggctgggaggggagcgagggataaaagactacttactgggaacagtgtacactgcttgggtgataggtgctttcaaaatctcagaaatcaccaccaaagaacttatctgtgtaaccaaaacccacctgtactccaaaaactattgaaataaatcatttgcattgtaaaaaaaaaaaaaaaagactttttccagggaaagtaaccttaacctcagagattgaaatgcatgtctttcatgattttattttgaaaattaagaagatgcagtttaattttcacaaaactctagcaaataggcgtggcagagcatttttatcactctttatagttggcaaattaagatatactaagatataaaagcaaagtgatgtgctcaagatgttcgtgtatgtagcaaatggcagagttaagtctttgactgcagagcttctgactagttcagcgctgttccatcttctctttccatcctgctgtctgttctctctttactgagttcagttgcattgcttttgataaaggatcaaaatggacatgatcatagagagctggtaagtgttttctcagatgctatcctctgccttccttcccagcctggctttctatgcaaacttaataagcatgtttcttctgctgtaatttaggatagtgactgaaatgttaaataatgcagatgcaaggccacttctagctattgtttcttcagtccaaatggtcatactttgggtgatgggttgtgtaaagtagctggttctccattaaggagctgaattaaaacctgaaacatttcatgtgggccactgcattgttgttaggggttagccacagtccatctgactggatagatggcggaaagtaaggaatgttttattacaatccaagaaaacccgaaactactcattctacaagctatcacactaaaaagcaagtcattaaaaggcataataattaaagcagtgctgtacactgaccttgtcacttgattctctgaaacacataaattgtttgcagcatcagtcagcttttgatttgtagtgtctttgaaaaacaatttaaattatgtattggaaagaggccaggagacccatctgctgggagtttgtctttctaaattgggtgcagtgggtagtgctgaggggaaatgacacacctctcttatgaatattttcatgaaccttctcagtctctagagaatccacccatgcactgttaaattgtgttatttgtgggaacacaatgacaagggcctaaattggaaagcaatacagatttagcaagaaaatgttttccattaaagggggacctgctaatttcctgtgtctaatgtaaagagtgagagggattgaatcaactacagcatcaaatgctaacccaaaaggcctactttcttttgttactaaattaacatactacctggtattccatttagataatcacacatcaaaaaacagaattgtaagatttctgtgaagagagggaaaatgaagtaaaaggaaggaagagataatatagttgaacttggaccagagctgctgcttcctccatcttcccactggaaatcaacaatagcagtagcattcagaatttattaagtgctttctatgcatcaggaagtgcaaatggattatctcctttatcctcaggaaaatttcattatttcactttgtaggaaaaggcaatgaagtttagaaagattaacaaattggtctaaatttccctagctagttttctgtagagaacttgcattcttcatagaaatgtcttctctgttttttttcctctcctcatttagctcctatttttgtcctggtaaaagtatagaaaaagaaaaaaaaaaaaagtgaacacaggcgtggcctatgcctgcttgaaagtaggaaagaaggattatcgaaaggggagaaaatgacatagaaaggaatttttcaggttatctaaattgacgctttcattttcaaatgggttaactctagtttcaagataacaaagtaaaacatttgctaaaaaataaatctgtattagaactgttacccactctcagcccagtccctttcatatatcacgttgcttttcatccagtccgggaaatgcccgtttttcccttttgagaaaaatctatgtcggcacttacctgtctgaggttatcttttggtaaaggaatatactgcttaggaacttccatttagctaccggtaaactatgagtgtattctgttgatgtttctgttcacttagcaggaatcataattttcctaagttcatgatgattattatttcaacaattttatttattttttgctagaatgaatttgaagatgccaaatgttccttcaaataaaaaaaatctcttcagtactttcagattatcaagtatggttgaggtatatatgaaggttacttgaaaggaaaaaaaatattggatcctaaaaaacattttggaaaatattatacacaactttaaataatttttcactgtttgatgtattcagtattacacaaaaatgggtttaattaaactgaaggaaataaatcaaaaggagagggctggctgacggttttatccaatgtgacctaggaattgaaagcagataccatcaaccactctaatttttatttcttctataaataagatgcagcaggactggaagcaagtaatctccttcttgcagtcctccattcctttctttttttgcccaaatgcttccctttaattttgacagtaatcaggtaacagatctctgaggcagttcctctgtattatgatgatcagatatatcatttaaaatatcagattattagattagagctccagttcattccttttaagggaattttttaaaagtgatagatgggtaccatctatgggtacgtttggatatgatcaatctgtgtctggttttagtttatgtttaatttgttcttactcagaaagcctcagttgcctaagtagtggctcctatcttatatttaattggtatttttttcaatttgaaaattgaatatgctcacacatgctctgacattttttttcattttatgtcgtttttttccctgcaatccacaaattctctatgtcttccttttgtaagcatgctggtgtgaaacagcttcagtgacaaagcagcttaggaattaaaagagtttatcatacatagccctaggtattactggctgtggaattttttttttttttggacaaaatctgagtctgtcatccaggctggaatgcaggggcacgatcttggctcactgcaacctccatctcccaggttcaagcgattgtcctgcctcagcctcctgagtagctgggattacaggtgcacactaccacgacaggctaatttttgtatttttagtagagatggggtttcactgtgttggtcaggctggtcttgaactcctgacctcatgtgatcctcccaccttggcctcccaaagtgctggattacaggcgtgagccgtggcacccagcctggttgtggaatttttagctaactacttctctgagaggcacattcctcatctgcaatatgggaataattgtagggctgtttcattcagtagtgtatgagaactgcttaattaattttaaaatgaaatgtaaactgatagtagaaatgtaaggtgatattcatgctgtatttgctttttttttttttcctaaagacatccattccaaaccagagaggtttgcacttttttttcccctttaagagagctcccaaaacattacgcttagtgctgactacttctttgtgaccctgctctactttgaatctacctttacaattaagtctgcccttagaatctttacccacaatgcagagatgtatttaagtacatgtttatatcctccttggactcatttccttgaaagcaggtagaaagggtgacctcacttatctttgcatccctagcatctagcgctggggtttgtcagttgtaagttcttgtaagtccctgttgaaccagatttaattcagaagactagaaagcaggaattctttgttccactctttcatttggttctcttttcttaaatgaagcggggtttgcctttctaaaagaatggtttatactgggccacatgtttactgatttttatgaaaagagaaagtagtaggaattaaattgtattcatgtaactttcttttatctttactgtaatcttaaaaaaacaacgagttgatgatgtcaaattgcttggctgttttctgtgtggaaaaaattacttttcagttatttattatgaattacctttcttctttaaataatattgttgaaattaacaatagcagggtacatttttattccaacagggtacaactaattagaaagtactttgggaaattcaattttaagaaatgttttatattaattttaagatataaagaaaattgaaacgtgaatttgaattgagtgtaatgtctttcatgaatttcttttaagtgtgattattatttctaatatccacctttactcaattctcctttaaacatttaataaccatgaataaataaattaaaaaaaattttatttatttttattttattttttttttttactttaagttctgggatacatgtgctgaacatgcaggtttgttacataggtatacacgtccatggtggtttgctgcacctatcaacccatcatctaggttttaagccccacatgcattaggtatttttcctaatgctttcccttccctttccctccatccacctacagaccccggtatgtgatgttcccctctctgtgtccatgtgttctcattgttcaactcccacttatgagtgagaatatgcagtgtttggttttctgttcctatgttagtttgctgaggatgatggtttccagcttcatccatgtccctggaatgaatgaatttttaaataagattcaggcaaaaaataattattagtctttttattgttttctgggctgggtgtggtggctcacgcctgtaatcccagcactttgggtggccgaggtaggtggatcacctgaggtcaagagtttgagaccagccaggccaacatggtgaaaccccatctctactaaaacacaaaaaattagccgggtatggtggtgagtccctgtaatcccaactacttggaaggctgaggcaggagaattgcttgaacctgggaggcagaggttgcagtgagtcgagattgcgccattgcactgcagcctgggtgacagagcaagactctgtctcaagaaaaaaaaaaaagtttgttttctgttagtttcatctaaaaatttctcttcctaggaattctcaatataattttgttccacttttttgtatcatagtaagatatacttaaaataaaacttcctataagtgtacagtggattaagtatattcacattgctgtgcaaccatcacaatctagaattctttcattttcccaaactgaaactctgtacacattaaatagtaaggcccagtttcccgcttttcttagtccctggaaaccaccattctcctttccaactctctgaattaggttattctaggtacatcaggtaagcagaatcatagtatttgtccttttgtgcctgccttatttcacttagtgttatgtcttcaaggtttatcgaccttgtggcatgtatctgaatatccttcctttttaaggctgaataatattccactgaatctctatgccacatttatccatttacctctcagtgggcatttgggttgtttccatactgttaaagaatttcccagtgacttaatgcttctaagcctataattttaccaatttgaaaatgcctcagcaatgatgaatttggcatagtcatttgacctttttactctaaagagaccacagaatgtgctcagggtgctgttactggagccaactgtgtaggctcatatcttgactctgtagatcactaacatgtgagcttgagtagattatttctctgggaccaggtgttcatattttgcaatagaaataataatagcataacaatgtcacaggatcctttgggtgttgcttttccagccggaaacctctgtggtcatcagcacctttgcctgagttttgctcaggcctgctgggctcgttctgcccacttggcccagcaggctgtgcttggctcgtgctaccagcccagatcccatatctgccaagggcgagccaggtgcagagtggcgaggggtgtgtgagtgagtgtggggtccgaccactgcgcagtcaggtgtgccggctgcagcaaggcaggcagctccaaatgctggtacaggtgccagctccatgcgaggctgtggctggatcaggtgtaccgcaagcagcttccaaggtgggtacctgggaacacggtggtgcctggaagcttggagatgccagggactgcggagccccaaagatggtgtcacagccctcgctcggagagcccctaggtctgggctccccaaagggctgcagctcttttctcctcatcacctgccacctggtgagcagggggcaagtttcagccctgtttgtcttacagttctttcaggcttgccaaatggcaggtcccaaattcttggtgggttccaaattcttgtcccatgcctaggaagaatgaggtatgtggacaactggagggtgaagaaggcagagaggagcttcactgagcgacagaacagttatcaggagacctgaaatgggtagccattttctgcaggcagattgtcctgacaagtttaggacatccgaagtgggtagctccttcttgcagctgatagtcctgacatctgtgtgagtctggctgggtccggtggtttttacggactcaggagggaggaagtgcatgttgattggtccatggggggccatgggcgggctcggaaaaagcatgataagttctcactttccgaggcagattctgtctggaactggtagcctggccccaggcttcagcccctccctggcttgaaggtgagatttctccggaaacccgcccctttccgcccagtaaccagtctccctcctgacatcaacatgtagtccacgcgcccaggctgtttgtgctgagggttacctttaggcccaggcagagctgccctcagccactcccctggcccctcttccacactcgtcagtgcccaaagtccaaagggggctgaggcagcagggggctggcatgtcattcctgcccccagcacgtgcacaccctgctgtgctgcgacagcacctgggctcggcctcaactttgctccacaccggagggggcgccgagagtggggataggccagggagtgggaacaggcacttctgagcctgcaggtggaggggcttacctgggtttggagctgtggctgtgtggctgcagcctgaccgagagcgtgggctcctgatgcaaactcggtggggttggggctccccctgttctgggctccctctggccccatggagtgtgcaatcccggccgcaccgctgcagccagctttttcacagcggccactctggatgggctgtctctgccatcaacaatagattgctgtgaatggcaaatgaagaaggacatttagttctgcttgtgaaaaaagtatcgcaaatgagaacccttcttaactatgtcctttaattcatttaaacatatatggactgaatgctgtaatcaaaatattgtttaagtgctctagcaaatgctaacagggctgtagtctttttctttgaggtgctcagggcagaatatatttctgttactacagctgactataaagtacaatttttaaattgtgaaatttttaattgagagagatcatttcagaatataggaaattgggaaagatttcagtcataatggtaatgttcatgtgtcagaagcaagcgtgtgtttcatttaattcttgtgaaaaatatgtgtagcaaattggaagcttatgattggctgcttaataacacatgagggcagtaagtatcagagaggttgcccaagaacttacagctgataagaggcagagttgagttataaacgaagatctgcgtgattacaaggcttgtatacacttgtgttcaccatttcactacatcgtgcctcaggctgaaagtgtaactatttgagatggatctggaaggagttgtaaggaagagtgtggaggaagaacatttcagataacagtggcagagatgtgctcaagtgaagtgcatgctcaaggctccactggcatatgattaagggaaggatgagttggacaagtaatttgggtatgaaattgcggagtagaaatcctaggcagaatgccagttggtgtttgaattggtaggcaatggcaagatatcagagatttatgtacagaaatgtcacagttgccttcatgaaaactaaccagtggaaatacaggcgatgaagaggaggaggagagaagcggattgagaacagttaggaggctgtttgaagagttttatgggagaaggtctggattagggtgataacctggaatgaaagcgaccttgcagaggtggaaccatgggatttagtaacttcatggatgagaaataaaggaaagaatgacagactaaagtttcaggttgagaggacgagtagggtgatggttcttttaacaggtgtaataaaatcagaaggagaaactggcttgacaagaatgtagtgaattctgttctggtagtggagtattgcagttagtccttttgctgatatacctaaggaagaagcataggaaaataccaactttagtggaaaagtaaaaagatgctgcaatatttgaaggtctaaagaaaggaagtttgggctggagataggaatttggaattgtgaagtaatgcctctttctttaaaacaaatccccaaattccaagattgtgtgggggccagattttgtgaccctaatgatattaattcaacaatcataagatacaacttcctgggtgtgggggtatgaaggggtttctgtccctttcaacagtagtccctatcaacatgatgtttatagaagcagtgaaactttgattttgacacagagaacagcagtgacccttcccttaattctttctagttaaactgagacaaggtttaaatgtttaaaaaaagcttcagcaaactcagcatttctcagtgtgttctgcgaaaaatagatttttggcctgtgaattaaaaaagagtttggaaatgctggagttaaaagaagaaaaatttttttttaattatgaaaatcttattttattttactttatttttaaaataaaccattttagaaaaatggctctagttagaggtgaataatctccagaattaaattttgagacatgcctatcatctttgacaaatgctgaaaagtcagattattctgtagaattatcaatacaaagtaatcaaaaaggcggagtaatgtaatctgtatgaagaatatgaatttagccaattctgaacatccactcggtagcataagcagataattgttctcaacaaatgaaactttctaattttaaaaacacatagttattgctgtgttcttgaaaaatagaattgagttgatacaagaaatttaaaaaaattattgaagttatttggtaaaatatcttaagctaagggggaacttatagtgcctatgtcctagaagaaaagttgaagagagctaacaagagattagaagattcagagaggatggagggcactgcgggtgtgatctgtgactctcatgtgaccaatcaatccctgttggaagctgggccctgtagatagggaaaaatgacataaaaactagtcaaagtcaaaattatactactaagaacatactgtttacacctttcagttaagcgattctaaaaaaatcccataatttagtatacattttgtggctcctcctggtggttcaagaaaaaaagagagatgaaaaagctgttttgcaatctgtgcagtagaattcattctttcaacccttgttgttggttacagaactgttttatactctgtttgaagaatgcaacaatatacaccatggcaaccagtgcatctgatgcataccgcattttagccacccaacaagactaataatataatagtaactattttttatttctctcattaactcttagcagtatttttagccatctttaaagccaaaattctcttttattatcctgaagaaaaacggtcatgctgaattttaaaataacatgaatttctgaatataatgggtaaatttcttcacattgttaacgtatttcattgccttcagcatattagattctttcttattttctaattcatatgtatgttataaaataattatttaggtagtgacaaaaataactatgctccattagcatttgggttcattaaatctctgtttatctgaagtgtatagacttctaacattattgggttaaaaaaaaaaaaaagaggccgggcgcagtggctcacgcctgtaattccagcactttgggaggccgagatgggcagatcacctgaggttgggagatcgagaccagcctgaccaacatggagaaaccctgtctctactaaaaaaaaaatacaaaattagctgggtgtggtggcctgtaattccagctactcgtgaggctgaggcaggagaattgcttgaacctgggaggcagaggttgtggtgacccaagatctcaccattgcactccagcctgagcaacaagagtgaaactccgtctcagaaaaaaaaaaagtgctagacaaaaagaattgaactccttttataagatttatctcttcctgttttcttttctctttctccatatcttgatgaataaaatagaaggtagggtgagatggagctgagttttaggagagcggacagctgtctttcccttttccttctcttcattgcacttacatgatttggtagaaacttcaggaattttagatactttggggtcattattcagcaactcaatattttactgttagatgtatgaatttaatgaagacaaagtctgattaacagaatttatctgtattttcatcattcttgacgaaataataatgataatttgacatcccactgcctaaaaacaacttaaaaagttctagacaaacttttgcctgggagaggctcagccagtgtggaatcataaccaaaagttttgtacactatgttcatactgtgcttagaattataaaaatctatttatttaatacttatatcaactgtataaaatggaaattagtatcttggtttttcttattgtatggggagaggatcaggaggtttggtcagcgtattggtccgttttcacgctgctgataaagacatacctgagactgggcaatttacaaaagaaaggtttaatggatttacagttccacatggctgaggaagcctcacaatcacggaagaaggcaaggaggagcaagtcatgtcttacatggatgggaacaggcaaagagagagagcttgtgcaggaaaacttcctgttgtaataaccatcagatctcatgagacttactatcacaagaatagcatgggaaagacctgcccccatgattcaattacctcccaccaagtccctcccataacacgtgggaatccaagatgagatttgggtggggacacagccaaatcatatcagtcagtatataagaagcggggtagagatctgagccataattcaaaggccaggtcttttttactatggctctggcttcctgtgtaaagaataaagaggaatggatgtgtagagccacagaaatttacccaatcatgagaggttattgactattttccaaaatgctttgctgttaaagttcattctcatggtcagaagtgagctcatgcattcaaacctgggaaaacatttagatcatctttggactgaggctgctcaattacattaccagtgtgtgttggggtcaaatgtagtacatgataaactgagctcagtggactaactccttctgtatggcttgagttcccctccacctggttcaacattttgttataaaaaagttacaatatgcagaaaagttgaaataattgtatagtgaatatttataagtccgtcatctaggttttacaattaaactcttatgtagcttactttaaaaataatggtgatgtcattcaaaactggactgtccacctgtatctgctgctatgaagacagacatatctgtatttctaacctgtctactaaattatctaagggcttccctcaaaatatccacttttaaaatactattctatacctaacctaaaccactccaactgagatatagttccagttgagtgtgtcagcaaacttgtcgtgtttgtttttcacaggtaaaagatttgcattacaattaagttaccacacaacacccacctacaccaacacattacaaatgctaactgtgagtctatttgcttccccacttcgctcatttcttctaagggtgaaaaataggcaatgagagcagaaagccttctagggaagtctctctcatagtagtgtgtttcccttctgcatctcttttgtgggttttaacagaaagaggctgcttcttaaagtttgtattgagcacaatcctgctccatatttgtcaagtggttctcatctgaagatttatgagggcattagttataccatagggacctggttggtttcagtgttagttctttgaagctactagcttcagaggacaatgtccatattttaatttagtaatatgaaagtctgcctttagtctccttattcaagtttttgggtagactttctgattatgctccatggttctcccctggagggcaggatgtgggactgaagattcagggacagtaggcattgattaaaaatatatactgtggcaatggactttggggacttggaggaaagggtgagatgggggtgagggataaaagactacacattgggtgcagtgtacactgctcaggtgatgggtgcaccaaaatctcagaaatcaccactaaagaaattattcatgtaaccaaacaccacttgttcccccaaaatctatggaaataaaaaataaaattatatataaatataaaatatataaaattatatataaatataaaatatataaaattatatataaaattatgatccatatatatatatataatccaatatatagtatgtctggttagtacactgtggtctggttcatagaatcagagaattcaaaatccaggtaagttcagtttaactctctagtttttttttgataattgagctgtgtgataaattatagcttctatatatgaacagccaaatttttttctagttgagtatgtcatttctgtacatataagtgctttttaacattaaagacatattagaaagttcatctataaaactatgaacatagaatttgaggtgtttacaatgctagatttatatgaagccatgtgttttggtaacccacatgtgcataaaactggcaaattgtaaaagccccagagggtagccagcagagggtttttgtttgtttgtttgtttgttttttgttttaacattactccagttagggaactgttgatcatgggagaaggaggataggcacagaagaaatggcttttgactcaggggaagaatcttcctggtaacactcagtttggaaagtcttcagcacatctaagatgccttttacactgtataactacaacagatatctttgaaggagacatttttatagaaggcagtagcagagtgtttacttcataggagtttcactactatgcatttccagtattttagatttgtaaaatatcaaatggggaaaaattgctagagaaatagcataataggtaatggagtaggggtagcagtttagagtgaaccttgagcgcttgcagatggcaacactgtgcgatgttccaccttctatgttcacatttcacttaactttgacaccttagatagacactgacacacatggcatatatccaattccattttttacatatcagctacttcagtggtgtctaatcttttggcttccctaggccacattggaagaattgtcttggaccacacataaaatacactaacaatagctgatgagctaaaacacacacaaaaaaaatttcataatgttttaagaaagtttatgaatttgtgttgggccacattcaaagccatcctgggctgcaggttggacaatcttgagctatctaataatttcaaaatattgcatgggtctatattctcatcctctcatcttgttcacactaggctggcattcagggcaggtatctgctttcctgtctcagacttcctctaccccagagcttcctcagtggggacagagggatggtggtaagtggaatgggcagtgctgggctggaagcaggtggccgtgcagcctggtgatgttctctatactcagcccagctgggagacacgggcaggagacaaacaacaaccctttaatctttgattcaggtactaaccagattcagattggaggctgaattcctgatctgcctttgttagaaggcaggtctttgggggaagggtcacaggtggcgggtgacaagtctttggagaagggaatgctggactaattgcttgtggcaggacaaggaaatgaccaactggctctcaggtcagcaatccccagatacccatgaaggtcatacccaccaacaggattacttggctctgtgagagcagtgttggaaaaaaatgtaattcaggagtattttttccctgttaggtttctatagaaacaactgtaacatatatgtctattgcctaacttagttaggcaatacatgtattagttaggcaatatacgtattatactaatatatgtattagttctataacatatatgttatagaaacaactataacatatatgtctattgcctaaagtttaatgagagacattaaactttgtaacaatttttaggaatatattacttacaaaaatagtataccatttcagaccccagaactgacagtattagtgtgcaacggcataagatatagaaataggagaggtgactcagatgctagagcagagctagcacgaccaaggagaaaaatgggttccaaatcaggataaagtatgtacactagcatttcctcagtgtccgggtgacaaggagtcagtggtttacaccagaactgcagtgataatagctatgtaagtggggctgctagggaaataagatatcttttagaaattgttaaagaagcataatttacaaaatttttattgagcatctactattccagcaactggaatgcagcattaaatgaaacagaaaaccccttgctctcttggcattaacataatactggaaatcaagtatactcgatggactttgtacttgttattctagtgaccgtgttaggagcatgtcttacagaatgatggctgaagtatcttgaatgagttgcttacttcttacttaagtggaattgtcatggttactatattccatttcagctctcactggagtgggttctgagatgtgaaagaaaggatgatctgaagaaattaatagaaagaaaaaagggttgagctgagaagaaatgcagaatgtgtacattctctaaagggagaggaaacagtttgctacaggccagtccaatgtagtcacttccagttcccagatttaaggatggaaatggaagtataacagtggctgataatttggaatatatcttagcacttctttctgttaaatagtaacacctgaaatatgtacaatgcctcatgacttataaccttcttttacttactttatcttattggaacctagtagtaatcctttaggtaattggaaaaggtaatattagcttaattatgtgcatgaagacaggtagatggactagcagaaggagtttagagtctttattctactcatggcttttaaccagagctcaatatgtaagcgttttctgggtaacccaaatggtaaaaaaattctgatggtctcctaatagtttcatgggaggacacagattttcggggtgtttcaggtccaatgggaatgattctgttttctctgtgtagacaaatgctgctttaattttgtgtagatatatctctaagttgtgttcttcttgaaacagataaaaaccaatgctaggacagaggtaattctacacttgatcttagccaaaaggctgagaagcaattcagaggtaattctagagatcttgttctgctcatattttaaacgagaaaactgagacacaaagaggttattggtttaccaagttaaaaattcttaatatagaattttaataataataatgtaatatagctgaaactcatataattacttcaataggacaatttaataatatagcagaaactcaactgataacttcaacaggacaattatgttgtaaaattgatgaaaatgaagtctgtagacacaaacatacgataaaacatgtgctcttactgattcattgacttctcttagccataatatttatctaccaaatttccctttatttttagtggtgttttatatttattgcagctaattgattctgcagagaaaaataagccctggtgcctctgacaggtgcagcagcctcgtgcagtatgttctcattatgcttatgtaaagtaagtctctactatcaaatgttaagaaacaacacagtggggcaaattttaaattaatggtttcagaaaatatcctgcagcctcatagtgtatcttgtcagctctctcaaattgtggacattcatcagaggtcttaaaagagaatggcaggaagtcagggaactgaaggtttagtagtaataaatggtatgtaagccaatatatagttggcttagtgttgttctgtgggataagaaatgcttctaaaccaagaaattacagaaaacatgcacaaacatattttttgactttggacagttcatgacggtatccttccaagattaaattaagaaaactaacacttaatttcatagctcaataggaattgttgaaattgtgatactgtagcaaactaaattaataattttttaaaaaataattcaggtattgtctgggcacagtgacttatgcctgtaatcctaatgctttgggagcctgaggcaggaagattgattgaggccaggagttcaagaccagcctgagaaagtagtgagaccccgtctctacaaaaaaattaaaattacctgggcatagtggcacattcctgtagtctcagctactcaggaggctgaggtggtaggacagcttgagcccaagactttgaggctctagtgagccatgattgtgccactgaactccagcctgggtgacagagtgagaccctgtctcaatagcaataaaataataataataatgcaggcattgagctaaaacaataacttggagtccgttaaaaggctgacatgatcagagtctctcactaatagtcaaggtataaaagtcccacctcttagatattattatagatgacacccattctgagtctattctctgattaaacccaggcacttctttcctgttttatgtccagcatgtttgtcagagggttttttttttatacctgtcttggtgtatctgagagtaacatatctatgtctgggtgtgtttcagagacagagattgaaattcatcatctccatagccctcatctagatcaatatttcatgtttttaaatgataggcatttcaagaaaagaagataccaattttgaggagtatagtagacaaagggcatgactcactgcttgttcatgtaaatcttctacctttatcacaggacagaatatgctcagagcaccaggattctccttttccctccttaccaccctccatgtgcatggttggtgtgatggtcattttgatgtatccacttggctaagcagtctccagttattctatcaaactctaagtgttactgtgaagtattttatagatgtgattaaaggaagaccacctaacaaacttccaaattggatgttcttaaattacaaccaaattcatcctaattttctttctttgaaatcctattgggcaaggctcagtggttcatgcctgtaatcccagcactttgggaggccaaggcgggtgcatcatgaggtcaagagatggggaccatcctggccaacatggtgaaaccccgtctctactaaaaaatacaaaaattagctgggcatggtgatgcatgcctgtagtcccagctcctcgggaagctgaggcagaattgcttgaacccaggaggcagaggttgcagtgagccgtgattgcgccactgcattccagcctggtgacagagcctcaaaaaaaaaaaaaaaaaatcaagaacctcgtgttggagaccttcattggttcaatgatattaaaaaccctgtagcactcatttgctgcattcatgtctgtatttggggtgcaaaagcttggggtatcatattgagcaatgtgttagctcagatttccataacaaaatgccacagatagggtggcttaaaacccagaaatttatttaattcaaactggcagtgtctttgctggtataatcccttctctattcctggcttctgttgagatggctgattaagttcatgtgttacacacacagtcttttaatcaaatggctgttcagccacacccctcgtattctcttcagagcaagcttttttttttcttttcttttctttctttcttttttttttttttttgcaatatggataggctgagaattttccaaatcttcaatttctggttcgttttgcttaataattccgtcctcaactgaactccttcccttctcagtttaccagaagcagtcaggaaaaatgaagctgctccttcaatactttgtttagcaattccctcagattcatcacctgcagttttaccttctacagaacactagaacacagttcagccaagtttttttttttccactatataaaaaggattgcctttcctccagtttccattaatatgttcctcatttccatttgagacctcagcagaatggcccttaacgtctgtatttctacattttgtacattattttacgtattctctgagaagatggaaactttctctttttccttccaacttgccctcgtcttttatttctgggcttttgctagaattgcatataaaatccatatttttattatgaacctcaaaactcctttagcttctacccattcattacctagttccaaatctacttctacttttttttttttttagacggagtttcactctgtcacccaggctggagtacagtggcgtgatctcagctcactgcaacctccgcctcccaggttcaagcagttctcctgcctcagtttcccaagtagctgggattacaggcatgagtcaccacgcccggctaatttttgtatttttagtagagatggtgtttcaccatgttgggcaggctagtcttgaactcctgacctcaagtgatccaccctccttggcctcccaaagtgctgggattacaggtgtgagccacaacgcctggcctacttctacatttttaggtatttcttggtaccaaagtctgtattagtcagcttaggctgccatgacaaaataccataaactgggtgacctaaaaaacagaaatttatttccgacagttctggagagtttgagttgtgcgtgccagtatgatcgggttctgacaagggctttctttctagcttctcactgtgttctcacagggcaaagagagggatgacaaaaaacaagctcttggtgtctcgtcttgtaagggcacgaatctcatcaagagggctccaccctcatgatctcctctaaacttaatcacctttcaaggattccatctccaaataccatcacattgtgcattaggggtttaacatatacattttgggagaaaacagttcagtccataccaagcaaaaatgcggatgcttatttcttaaaattgacatctgttcttaaaatgttgtatctataattgccaaacctattcaaatgtgttatatctgaaagtttgaattagttggcccttttcctgatacccttcattaatttatttaaaatatttagtgtggggcctgacacagtggctcatacctgtaattccagcacttcaggagattgaggcgggaggactgcttgagcccatgaattcgagaccagcctgggcaacataaggagaccttgtctctacaaaaaataaaaaaaaataggtgggcatggtggtgtgcccctgtagtcccaggtactcaggaggtcgaggtgggaggaatgcttgaggctgagaagtcgaggctacggtgagccatgtttgtgactgcactccaggctgggtgacagagcaagaccctgtctcaaaaaaaaaatatttagtgtataccttcctttctttttttagacagagtctcgctctgtcacccaggctggagtgcagtggcgcgatcttggctcactgcaacctccacctcccaggttcaagcaattctctgcctcagccttcggagtagctgggattacaggtagcccgccaccatgcctggctaattttttttttgtatttttggtagagacagggtttcaccattgtggccaggctggtcttgaactcctgaccccatgatccacccgcctcggcctcccaaagtgctgggattacaggcatgagccactgtgcctggacagtgtataccttctatatattgtagattactgtgagtgctaggagcattaaaagaaacaaaaggaaggcttcaggtgcataaagcttacattctattggcaactgcattttttttttttgacacagggactcactctgtcacccaggctggagtgcagaggcacgatcttggctcactgcaacctccgtcacctgggttcaagcaattctcctgcctcagcctcctgaatagccaggattacaggcacgcaccaccatgcccagctaattttttgtatttttattagagacagggtttccccatcttggccaggctggtcttgaactcctggcctcaagtgatctgcactccttggcctcccaaagtgctgggattacaggtgtaagccaccatgcccggccggcaactgcattctttggagtgtccatccacacaaacatattttcatttgacagtctggaacatctcacgtattgctagcaagcaggtttggatgctgatgtttggatctgaatggagcactactacattaataaaagcagatattaatcccgactttttgttttatatgggatttgtttatatttttaattgtcaaagaaaaattatatatatggtgccaacagtcaactgattttcttgtcattgttttgatactatctgggagacagcaacatttttacagattctataacccttgaagaaagaacacttctatgtttttggcacatattgcaataaatggatggacacaattccttcattggcagattcatagcaactaatagcaaaaagaaaagtaatgtgatcttttacaaaattcgaacatttctatctcagctaggtcaacaattcataggagaataagctaaaaagtattgtgggagttttctgtactaatgaagttaaagtactcagaatgtaagtttttatgagacaatctccagtagtttaaaaaattcactgtggtatagacatcgggcttttggatttttaaaaaatttcaacttctattttagattcagggggtacatgtgcaatcttgttacatgggtgtattgcgtgatgctgaggtttggggcatgaatgatcctgtcacccaggtacggagcatagtacccaataagcagtttttcaaccctttctccccttctttcctctgccccagtagtcctcagtgtctgttcccatctttatgtccatgtgtacccagtgtttagctcccacttataagtgagaacatgcagtatttgaatttctgtttctgagttaatttgctcaggataatggcctctagctgcagccatgctgcagcaaaggacatgacttcattccttttttatggctgcatagtattccacgctgtatatgtaccacattttctttatccagtccaccactgataggcacctaggttgattccaggtctttgctatttgtgaatagtgctgcgatgaacatacatatgagtgcatgtgtcttttggttagagtgatttaatttcctttgggtatatattcagtaatgggattgctaggtcaaatggtaattctatttttcattctttgtgatgtctccaaactgctttccacagcggctgcactaatttacattcccactaatagtgtatgagcattcccttttctctgtagtcttgccaacatctgatattttttgaatttttaatcatagccattctgactggtgtgagatggtatgtcattgtggtttttgcatttctctgattagtgatgttgagcatttttacatgtttgttggttgcttgtatgtctccttttgagaagtgtattcatgtcctttactctgtttttaatagggttatttgttttttgtgtgtttaagtttcttatagattctggatattagacctctgtcagatgcatagtttgtgaatattttctcccattctgtaggttgtctgtttactctgttgatagtttctcttgctgtgcagaagctctttagtttaattagatcccactcttcaatttttgtttttgttgcagttgcttttggggacttagttacaaatttgccaagaacaatttccaaaagggcatttcctaggttttcttctgggatttttatagttttagatcttacatttaagtccttaatctatctcaatttcattttgtgtatggtgataggtaggggtccagttgtattctttctagcggacatcaggattttgatgtataatttgcttttatggaatgttgatgagtattccaaattctttggaactctcatacactgctggtgggaatgtaaatggtataagcactttggagaaccattcagtgttttcttaaaaagttaaacatgtgcataccatgcctagctcttccaacatagagaaataaaagcataaacccatgcaaagacttctatgcagatacttatagcaactttatttataatagctccaaatcgaaaacaacccaaatgtctatcaactggtgaatagataaaaaagataaactattaatacatgcaataacatagatggatctcaaaataatgatctaggtgaagaagccagacataaaatgaatctgtgttgtatgaaaaattttagaaaatgcaaactaattcatagtggcagaaagcaaatcagtaagtgcctgggaatagggatgggagcagggagggccagtctacaaacgagcatggggaaacttaggagtgatgaatatatgttcattatcttaactgtggtgatggctaatgtgtaaatcatcaaatagtacactttaaatatatgcaaatttttatgctttaattatactctaataaaactatattttaaaaggaaaagatatttactcgttttgcacataaaacatttactgtgcttatagaatgtaataggaacagcaccttttattgtaccattcacttttcttatgtcattatatttcatttatcttaattcacataaattttatttactgattcatttttgatatttaatttttaaattttgtgggtacgtggtatatttatggggtacatgtgatgttttgatacaggcatgcaacgtgaaataatcacatcatgaagaatgaggtatccatccctttaagcatttgtcctttgagttacaaacaatccaattacactctttattttaaaatgtacaattaagttattattgactatagttaccctgttgtgccaccaaataataggttttattcattattttttattcattatttctaatttttgtacgcattaactgtctctacctccccgatccccagccccctactacctttcccagcctctggtaaccatccttctccctatgtccatgaatttaattgacataaattatagacttctctcctaatgctttttcactctctgtctagtatatcttcaccagttaagattatgacaaagtttattttcctgtatttttcaaactgcacatatgtccctgctctatggatttttttttaggcttttaatgtcactctattttttaaattgacaaataaacattgtatatatttatggtacacaacctgatattgtgaaatatgtatgcactgtggaatggctaaatcaagctaattaacacatgtattgcttcatgtacttatcatttttgtgtgtggtgacaacacttaaaacctattctctttagcaattttcaagtacacagtaagttgttattaactagagtcaccaggtacaatagatctcttgaatttgtgaaatttctgactgaccaaatctgtgatccctcttatttatattcccatctgctcctcctctatcctccaaaaactactgatatgcaatatgcttaacagatatctaacaatatcaaccctcactacaccttgaaacttttcagatgcagaggtgatgcctccacaaaatcccttttgtgtattttactccttgtagctcatttctagtcaaacacctaaaaaagactccatagaacttccctgttttggagactgtagcatttgttcttttcttccagtatatgtgtgcacaaatattttggtcatattatcattcatttaattagttaattatttttttcattgacaagtaaaaattgtatgtggtatacaacatggtatgtatatatatgtgtatatatacacacacatatatacacatgtatacaaatgacttaaacatatatacacacacacacatatatgcacatatatacaaatgacatatatatatacacacacacatatatatacacacacacacatacacatacattatagaattttgggctattttttttttttctaattttagagtctgtttctcaaaactttggtgtcatttgctgactgttttgtccaaatacataagcacgtggaaaattgtaacccttaaaggccatcttttgagcatgtggtcctaaatgagatggtcttaattcctcacattttattatcagaagctactagaattataaaaagtccattagttaagactgatgttaagacagtgtccaacacactgtgagtttttcagaaatcttagataacccagtggcaataaataatcgccattttcaaggtacatttgcctgttttgccaagggcaaatggactctttcaagcagaagtcaattatgtctgccttttgtaggtgcaattttcccctcacccactgggcccttagggtacaattcaaaagagatttgtgcccaaaatgagtgatggtctttaacaactgttaatactgagtaccatttgccagaagtgtcctctgccttttcattcaacctcagtcacatactagcatccatcataatgcatttgccaggggtttccaggatgactttaagtagtaatgttagtgaatgagaagaaaagtgcccagtgagcctagttagagttggtgctggatgtcttactttataatgactgctgcatatttgaaacatactcattgatcaggtttcccaaattgcattatgcagaactctagaggttcatgagatattaataggtggttggttaaaaaaattagagtgtcatggttaaataaatttgggaaagtgtgttaaataaagttaagcagattcatctgctgtgggatttctgagaaccttccatatgtcattgtgaattttgaatctctaaaataagcatatagtacacagcattgcctaaacatgtttgatcacagcaccctttttcaaaatttaaaaatatccaattgcatcttgcagaaaatgaacactcttctaaattaatttggagaagtctttctgtatatacttccttttgtatatgttttcattgcaaatcaaaatgggagagattggaaaaataactatataacaaagtgagagagaatgctataactaaaatttagcaagaataaccttgtctccatacttgtatatggataatgtatttaaatatattaaatattgcaacacatacattatacaaaatgctatacatgtgcactttgtgcccttttaaatattaaaataaaacatttcttgtcattatttctctccagtttccctctgcaatacagacagatgctaatagataatttcttcgtgattgagaatattttaccaaaatttaaaaaactaaaataatggtaaggaatgcagtttcaaaagagtaactataatactttatttttgtgtatcaccttacagtttgccaagtaaccttggatatattatcttatttgagtctcacaatcattctgcagagtagacaagcccagcatgagctctttttacattaaggaaatgaagatcagagagattaaatcacttactgatgattcccacagccatggggcaccacgaaactaagcctgccattctgcctctcacctgacagagaaagggaggggacaaaattcctgaagtgtatatatacttttgaaatattttgtgcttttataagctgtcttggttcactaaaactttggaatacaaagccagtggtgatttgcagcaatatactaatccactaacccaccccaccagtccttttcctcctcctccttaaaaaaaaaaagcaacaaaaaaacccaaagaggcccatattctccattttcagaattccaatcatagaggaaaggttttggctaaggattttaattttatttgaaccccctggaatcgtcttacttttcttggcaagcatcattagaaagttaatttgaggaggtgatatatagaatgtcttagagatgattgaacatcagagagttaaagggatttgttcaataatgtgtagtaaagttgtggcaattaagagtgacagagaggaaaaaaacttttcctctatgctcctaagttcagtggctaggagcctacacatgtaactcatgaaagacagattaacacaagaaaaggaatacaagttttattttatgtgcatgggagttcacataaaaggactcaaagaaaagaagtgaacccccacagaaatggttataccgcagggcttatataccattttaacaaagaaaaggggggttggctctgagggatgataaactgtgggaaagtgactgtgaaatatatgagtgaaactaatggaagataagggttatttcagtaaggtatgtttatgcagactcatcttggtgccagctgtctgtctctggtgataagaattgctctcctcttcctggtacagagagatggacaccttcattcacgaagggaaatttatgctatcttcacaaagggaagtttatgtcctgcttttaagtgggcaagggtgggcagagaactcttcctgcatctattgctttccaactgccatcagctcaaaataattcttatcccaaagtgtcatattttggggtggcatatcctgatccccttcaccagtaaaatctgggattcctacttcattgtccagtgtttcccccattttactacgctggcaaatgtgtttatggaggaagataatccggtaagtgagttacaagttttccagtgacatagaatgatatgaaaaaaattatgagtttagaaaagttgaacatggtagatagagttcagtgttgagtaaacaaggaaaactaggtttgtgcacagtttttggtgaaagagtagaggccaatcacatcatccaccagcaaagtaactcaaaactgtcatttccttcatgtggatccttgtcatagtcttcatgactgaacaatgacattagaattgttgattttattatcatcatcctcgtacccaaaccatcatcactgggaaggagattatcaccagataatgactacttctttattttcctgtttttgaactacaggaataattcctacaaaagtttgagctcatgtctgagatagtagatatcagatgcatgttgaacagtttttttctttccattggattttgtcacttcctttctttttccttaaaaaataatgtgaggtcgggcacggtggttcacgcctgtaatcccagctctttgggaggctgaggcgggtggatcacctgtcaggaatttgagaccagcttggccaattggcaaaaccctggctctactaaaaagacaaaaattagccgggcatgttggcaggtgcctgtaatcccagctactcaggaggctgaggcaggagaatcgcttgaacctgggaggcggaggttgcagtgagccgagatcccaccactgcactccagcctaggcgacaaaagcaaaactctgtctcaaaaaaaaaaaaaaaaaaaaggtgaaactttatgcttgacaattaataaaaataactttatcataaaaaagtaaataactaagcaaaaccaccaaaggaaagactatagtcaagtggttgacatattcttgaatatcttgggagtgtgtcagattagtaagtatttaactttgacttcccttccccgacaaaaaaattcaaagcatttcagtgtctccatattttaattaagtgaaaattattcaaatattatttggcctttgattctagtgacccctcattctttatgaatttgaccctgctttggattctgggagcccaccaagtaaattccacttacagttctggtcattcctcagtcagtctaacaaggattcccttctatatgacagttaggagtttgagtttctctaagcttctgtcctcaggcttctctcctctcgctcacatcctggggtgaatggtgatgagataaaccatcacaaaatgagcattttgattatgacagcgaatctcaacagcctccagatgtgcatttccatgtagttatttctccagtcctgactaggcacatgctccagccagaaagcccaaattctcccttttatttccacattcaattatctaatgtcttaaaaattccacctcctaagcattgctcatccgtttcttttatttatttatttatttatttttattattattattttactttaagttttagggtacatgtgcacaatgtgcaggttagttacatatgtatacatgtgacatgctggtgtgctgcacccactaactcgtcatctagcattaggtatatctcccaatgctatccctctagaactagaagtaccatttgacccagccatcccattactgggtatatacccaaaggactataaatcatgctgctataaagacacatgcacacgtatgtttattgtggcactattcacaatagcaaagacttggaaccaacccaaatgtccaacaatggtagactggattaagaaaatgtggcatgtatacaccatggaatactatgcagccataaaaaatgatgagttcatgtcctttgtagggacatggatgaaattggaaatcatcattctcagtaaactatcgcaagaacaaaaaaccaaacactgcatattctcacttataggtgggaattaaacaatgagaacacatggacacaggaagggggacatcacactctggggactgttgtggggtggggggagaggggagggatagcttatccatttcttgatctccacctgtactacagacctttgtcatttcctaccttgaaaattgaaataggcttctttttttctaatttccaggctagccctttctggggcattttggactttctctgttaataacacttcaatacctatggagataaagtccaaacaccttgacaggacataaagctctcttgtgagtgggtccttgtccatcttttcagtctcatctcctcccacttcctctaagattatgacatatttcctctgggaaactatttgtagttcaccaaatcacctctttctctcaggcctctgtggctctgtacagactcttgcccatctgatatgactttgcccactttgtctcttgggagacacttattcatccttcaggtgacattctcttatgcaaccatctgccatgggttcactcccacagcctgtttttgcagacattattaatggcaggtaacacatattttagtggttttagagacctgtgtgttttattgtaaaagtttgatctctttgagtatggaaatcttatcttgtaattctttataaccccaattgcaacagcaatagaaaaagtaagatccatgagtataaacaaaacaagcaatgtgcgagcttttatgaaacaattttttatataattgcaaggtctcaaaagaagatatgaataaatagataggcatgacatgtttttgcttaggtaaattctatatcacataagtttttcctaagttaatctatatatttgaccttacctccctgagatattatagatttcttttttttgaactagacaacactcaaatgaaaaaaaataatgaatcaaaaatttattgaaaaaatacttgcaaaggagagtaatgtatgagggaactggtctggccgaatattattaaatactataaaatgtagaatatagtatggaatatgaaaagagacaaatcaatgcaacagaagagaaagtcaagaaataaactggatacatatgaagattgactatatgatcaaggtgacatcccaagtctgtagagaccaataattggtgtagggtcagtggtccagtttgagaaagtgatcttgtgttacaccacagtaaatgatagtgaactgaatacttaaatgtgagaaatgaaagcataaaagaaacacagtcatgtgtcgcttaacgacagggatatgttctgacaaattcatccttagaatgtacttacacaaacctagatggtatattgcctacaacatgcctaggctatatggtatagcttgtttcacctaggccacaaacttgtacagcatgttgctgtactgaatactgtagcaatcataacacaatgatcagtatttatgtatctaaacatggaaaaggtgcagtaaaaatacaatataaaagataaacaatgatacatcggtatagggcactaaccatgaatggagcttgcaggactggaagtcactgtgggtgagtcagtgagtgagtggtgagtgaatgtggaggcctagaacattattgtacactaatgttgacttcacaaacactgtgcacttaggctacactacatttatattgaaaagcttttctttcttcgataataagttaaccttagcttactgtaactttttgactttataaacattttgtttttttaaacttttagactcttttataataacatttagcttaaaatacagattcattgtacaattatacaattaggatataaagaaattttgttttctttgtatcctaattctataaactattttctatttaaaaattttttttgtttttaatttttttttcttaaacaaagacacaaacacccacagtagcctcgccctacataagattaggatcatcagcatagctgccttccacctccacatcttgctccactggaaggtcttcaggggcagtaacacacatggagctgtcatctcctatgacaacaacgccttcttctagaataactcctgacagacctgtctgaagctattttacagttaacttctttttctataagtgatggggaatactctaaaataagaataaaaagtatggtatagtaaatacataaaccagttacatagtagtttattatcaagttttatatactgtacctaattgtatatgctattatttcatacaactggcagtgcaggtttgtctacatcagcatcaccacaaacacatgagtaatgtgctgtgctgtgacataatggacagctgtgacatcacgaggtgataggaatttttcagctccattataacctttaagactgctgccatatatagtgtccatcattgactgaaatgtcatcacgtggcgcatgactgtattttaataagccgtaagagaatctttttataaccttgaagtgagtaaatgctttttaactaagacatgaaaacaataagccataagaaagaagactgatgaattcaactacatatgaatcaagagtttctgcatcatgcaaagatcaacataaataaatttaagaaataagaaatcagggagaaatatttgcaacttgtatcatagacagggctaatttacctaatttataaaaagcttgcatttctcaaaaacctaaaaatagaactactctatgacccagcaattccaccattaggtatgtatccaaaggaaaaaaaaatcagtataccaaaggggtacccacactgcatatttatcacagcactattcacaatagcaaagatttggaatcaacctaagtgcccatcaaggaaagaatggataaagaaaatgtgatatatataatcaatagaatactactcagccataaaaagaggatttgctatttgctgcagcatggacagaactggaggtcattaggttaagtgaaataagtcaggcacaaaaaggcaaataccacgtgtcctcactcatatgtacgagctaaaacagtcgctctcatggacatagagaatagaataatagataccagagactgtgaggggtgggtaggaaggagagaggatgaagagagattggttatgggtacaaacatacagttagatagaagaaatacattttaacgtttgatagtagactagggtaatatgatttgaatgtatgccgcctccaaatcacatattgaaatgtgatctgcagtgttggaggtgggcctagtgggaggcatttgggtcgtggtggtggatctctcatgaatgtcttggtgctgtcttcacagtaatgagtgagttctcactttatgagttcatgcaagatctggttgtttaaaagtgcctggcacctcctcctcttccctcttgctccctctttcgctacatgacatgctggctccccttcactttccactatgattgtaagcttcctgaggccctcaccagaagcagatgccagcaccatgccttgcgtacagcctgcagaacaactgtgagctaaataaaccttttttcctttataaattaccattctcaggtattcctttatagcaacacagaatggactaacacatagggagactattcttcacaacaatattctgcatatttcaaagtaactagaagaaaggacttgaaatcatacaacacataaaaatgataaacagttgagaagacggatagcccaaacaacctgacttggtcattacacattcaacatatgttacaaacacatctacctcataaatacataaattattatatatcaataaaaggagggaaaagctcccacattcaataaggcaaagactgatgagccaataaaaataagtaaaagagatgagaagatagtggaaaaggaaatataagtgcctcttcaacatgtgaaaggaggtacaacttcactcacaagagcaggacaagtttaaatacattgagctctcattatttatccttcagattagcaaacataagaagtcttggtaataatttttgttagaaaatgtggagaaacaatcttttcttatagactgttgataagagtataaatgggcacaggatttctacagggcaatttggcaatatctattgaagttacaaatatacatattctttgatccagcaattttacatattatttaattcacagatttatttgtaactgggttaatgtacttagaaatatcaatacaattttaaattaaaaattaaatcaacttttgcttaaaagcatcttcatttcagcatcttttggtctagtgttatcttttcccttttccttatcctgcctcatggtggggcaatatatctccttacatttggtttcaaacatgtaggactttgtcatgaatccattatgaacctgactgacacatttctctgaaaattttgtactttaaaaattgttaacaattagcagaaaaattagaacaaggaaaatggttactcttcttatcgtctattttggaaccaaaaagctaacattttatttagcctgagaaagtaaatggtcttaaatcatcgatatgccatccattgcttttccaaaacagtgatatattttttaaaaaatcagttatttctttttgggtacatactttgctcaaatgttatttacttattttaacttataataaaaatggataaaatatgtaatacatgaagctgcccgatttgagtattttgtgcagcggttagtataaatattttgaccttcatcttgtcctctggggaaaagagtaagctttcagcttttcagaatggcgttttcacacatatggccacaggctgtgctatcctggagaagcaggtggctaagtgtggttctggtcacagagcacccaaagatttatccttgcctgatgacaactacactcagaaactgtatataatcagcagttccattacaggatacccaaatacgatgttcttagggcatcagagtatgtttttttcccgtgtgcttcttagaaagtgttttattctccccatctcagaagaaaactattacttacagaagagaaagggctcttgaaagactttgatgtcagaaaatatgacttacaaccacatcacattaaatttaagacttcgattgctaaacagtgaatatacatacagaatttattgatgataaggaaatttgtaccttaaactacaattaagacttaaaaacagaagcaaataaaagtgaataaataagccatgttatacaagcacaggcataactaaaattaaaacacgtattagccttctcactacttgcacttgactagtcttaacaaaagctagtattggagtggactgcaaactcaatatgaaaccatattgtattgtggtagagatatggcagcaaaaagatgcaatatacataaattgcatagttctgttcctgattactgtgtaactccaaactagtgaactcaagcattccagttcacctcctctgaaatcttgccacaacagcatacacttttctccttggagccatcatcctgtagtgtgttaattcttacattttacagtagttttacctggaaaaagtggtacctacaccattaacttattaagcttttcctttttttttttttttaactgaatgagtctttccttttgaattacatttttaatggaaataaactagggttatagtttcaggatttcccaactgcataggactgtaaacattatataaagctttgtgtgctacactttattagcttttaaaggcagttgagtggagtttattgtacataagacttgcatttgtagttagagaaaagcctcacatgattaccatctgtttgcttttgcaagtgtagccctagaattctgatatgccaatagaaatgttattttagttttagttcacactggaggttttccacaggcaatttaattctcctatttggaagaatatttgtgacccctggttataagccaataggctcaaattttgaaatttacttacatgaaattaacacatgataaatgatataagaatttcagtttaacttatgtttggtgcaaagctggagttcctaaaataagcctttggtatgtggtgtcatatgtgaattaaaaagtgagatgattcttctgcagaaaggtaatatataaatgtatccaaattctatttggaggacacaggggggaaatggtcattttccattttgtatcattagtgggatattttattatttaatagcccagacactccattactgaaagtaagcacaatccttgctgatggtaggcagatgaggctgtgattctatattctgtgtctaggtggtggataggagcagtccagtccagctgtcccacagactcagcctgttcattggggaaaagggctcagtgaccacagctaacaaagaaaagcagggagataaagcaaaaaatcttgcagctgctgatcagctgcttcactcgtggggcctcagagaaagaatttaatttgtcctaaacagcatgttttaagttacagtacaacacacctatccacagaagtatacgtggaaggctgttgggaactggttcttccaccattcttgaatcaaaggttttaaattataaacatgcagacaaaggagaacactgttctgtttaggtttttgttttttgagctgcttgtttcaggatgctgttgaaatcagagcaagaactaagtgagatggatgtggtattaagtagattcctcaaaatgatggcaaatccttgctgttctttagtttaaatatattctgaaaactacagagtgccttaaagttttgaaaactgttttaaatatatattcactattttaaaattttatgtgttctctatatattttctcattctccatacctttttagttgaaatacttttaaatttatggcaatgggtccaattgttaatctgaaaacatacattaagtacaaaatagagtatgcaaaaaacctgtaaacaccaggaaatttagagccctgaaatatgtctggagattggagaaaaatacatcgagaagatttttcataaatgtaactaacctgccttttaaaaacatgtttatcctttatttcccgatcatgagcatcccatgattctagagacttcagctgggtcagaggacccacagggcatattctctggctcagtgttggaccactcctgatgataagtggcttgggaaaggatttggatttctcaacatttgactgtatgtgtcttctgtaaagtaatgcagagtaactcagtgctgtggtaaatcaagtttggaaatactcaactgtgtattttaaaaatgttttttctttatggagtagggatgtgcttttaattctcactgtatcttcattaatgagcccaaaggttttagattctatgtttcctaaggccccattgttgagagtacacacacacacacacacacactcacacacacgtgcttgtggtataatatgccagcactttggtttgggaattaggcagaagttagcaaataagagaataatcctcacatggcaaaaggtgaaaaaattgaagaaaatgtgaaactacttctggggcttttaccttttgcttttattttgcctggtttctctttttgaaggaactgtattgtgtgattcttatttgaagaaattgttgatatcagtaagattgtataatttggtaaatataagtactctgagagaagtgtttcctgtaatgtcaatcaatttaatcactatccacttaaaaattgttctctctactacaaaaccaatatatttccctcaaagaacatttcaaacatagagataagcccaaatgaaaaaagagttacctctagtcctatcaaaatgtaatattggattaaaaatattttaatgtatgtatgttttaaaaacctcatttgtttacttattcatccatttatttattcaacaaatacatactgagcgtagactatgcacctgacattgcactagatgctgggaacactgaagtgaacaagacagttaaggtccctgctctctgagaacttacatcctagttggggaaaacagtcattagatatgcaaataaagaaacaaatgagaccatcaatggttgtgataaatgctaggaaggaaatgaacagcctggtgtgatggagagcctaaagaggagtcctctttagacatggtagatgggaaccaattcaggagatttataaatccatacccaaacagagtattttaggtagagaatgccaggtgtacacagtttttaacctgtcctctttcccactagatataaatgtcacagttcttcatataaaactcttgtggtaatagatagcttagaattttttgaacctttgaaacataatatggttaaatacatacattaggtaacattttcagcagtgtctggggcagtggggcagcaatctgtcatacacacattaatatacctctagtgaagcaagaataatcacactgtgtgagaaaatgactatgactagcctcacttcagattaggttttggtgtcaaatgagtcctggtcagaaaaagttttgctgctaaataagttatatataaacttttgattttctgcatattttggatttaaagataatagtaaggggatggtggagctgtatttcataatacaaaacagcataatcaatttcgctaatgtcacatttttatacatctatgctgtttccatttaggttattcaggtgagataaaatgtttaagctgggataaatgtttttctagacatatatttgtggacattagtgatcattttcttaggatatatttgtaggggaggtgaaattttatctctgctctcttagagttctttgggcctgagaattaaactgacttaaggcagattaacaggagaaaagcatacaaatttatttaatgtgacttttatgtgacatgggagctctcctaaggaaatgaagacccaaagaagcagttagaattgaatgcttatatacagaattggacagagagtagtggattgtgaaaatgtgacaagacaaaagagcttggcctagagtcgttaatcatgaaaaagtaactagaagataagggatagtttaacaaggttggtttgtcaagatttctctgggtcttgactccctgtctctggtgacaaggatgtaattttccttctggtatagagaggacatcttacatatggatattttatctcctgcttttaggaacaaaaatggggaggtcagaggatccttcttgcacttgctgtttttttaagtgcctttagctcaaaataattctttatgccaaagtggcatattttggggtggcatagtctgccacccttcacattcaattgttatgtaagggttgtgcaaacaattttatgcatatttcttatgtagaaattttattttatatttaaaaaataagtcctctcggaagagtttcctaattctgtagctgagttgagggttattattctcataataccatgtctgaggctcaaatttcatcatgtttaaaagcaacaacaacaacaacaacatgttctttggtcctggttgtttttcactttaatgcctttacacttgatcctccatttataacagaaactgcatgtatatagagattggattatttaccacgaaaatgcagccattcaggggaaggaggagaaggtaattggtttttattccctatcaaaacagaatgattcaggacctggagttatagaaaagtgtcctttatttaattacagaaccatgggccatgttgacagatttctgagctgtaattgtcttttctgtgccctcattgatttggttatgcatctgaccttcccgattaaaatctgcctgggaataactccagaatctagtcttcacagcttatcctgttgagaatgcgataggtctttcctttcagagaataagctccatcagtttctcatatcaactctggtttaagcatttgtgatatcaaggtcacatgtctgctgtataccctcttaattaaccataccctttctatggctagtgcctgcggtgtttcaagtgagataccagtttttatcaaagctttagagtcaaaatgtcaaatcattgctgtttgtggcaaacatataattttatcactatatctgttaatttagcagaaaaaatatgcaatttgagaagtgtgtaaaactttagctataacaatataaaattcaaggattctgccattatttacctgtattccaagagtcaaatgaaatccttctttaatttctagccatacagaacctacttttatatgtgtttattgaatatacatatcacatattcaagacctgggtgcgtcgttcatgagcatgctattccattggatctcacaggcctctcatccatagatgcctatcactgagatctgtatattttagaaattggaatgtcaacattattcttcttagaataagtgaaggggctttgtgggcgtgagttgtgactggttgctaagaatatctaatcaggttgcattgctatagcaacagtgttgctaggactttaaagtttccctgcaatcagttggaattcataagtgaaagacattgtttatctcagtggtattttaaagtgatcctagctagcataaggcaggaatcccatactttggaaaggaattgatagccccaatgaactgcgctctaatttatgattcgttcagagtgtgtaatctacagaaccagggtggtaatttagcagcctgtttttccaggtgttttgattcggtagtccctacctagtcaaagatcatttccatctgactcttccaagagttcacaaggttatcatacattgataattttaaaaggaaaagtatcatttcatatttctgtcacagagcagaaacttgaggactccaaaaattatattattatttttggtttatatattattggtatttatgtctttctcaaaatgataatagctctatttttctaattatagtagtacttcatacttatctaaaatgtaggcagtttagaaagcacaaaacagatagttaaaaatctcccagagttaactacttttaacatcttgttgcaaacattacatatatctatagttgctaaataaagagacataaaacatatatgtgtttccttggcagtggcttttcttaaaggtaactttacattatattttcaaactgttttaaaactgtctttatgtttggtctattgtggttttgaacattttttttcccctcaaacatacactcaaaacattgaaatggtcaggagttagtcttaaagtcaaaagcctcgtgtttactaaatatctgctttgtcctattccaaaagtatttaaaatatttagcttaaggatttcataaatcaccatcttagtggaacttaaaatcagcattttttttttctagttttaggccctaaacttttgagtgagggaaaaaaggttgtgcaactgtttcattccaatcttgtatgtggaatttgattcaatttaaggaattaaaataactacatatttttaacaggttgagcactagagcccagagagttggttttaggttggctggatatgggtttgcatcaggcatggactataagtagcattccctgtctgttgcatgttattttatggagaccccaaaatgaaatgaaaaataaaatggaaatgaaaaataaaagagaaaatatttgaaggttccctaggatggctgggtaatcaataaatatcaagctgctcatagtctaaaagataaaaaagccaacatattttgataattaagtatgtactaggcactgttgtaagagtttcactattaactcacttaagctttatgataaccgtatgaaggttctatgacttgcgataaccctaggaggattctattattattcccattctacaggttaggacactgaggcagagtgaggttgaaaaactcacccaaggttgcatgactaccatgtctattaagtctcagagccaaaattcaaacccggatctacctacagagccagctcttaaaacaactgtgctttattctaaaggatactggttggtttgtttggggtaagttagatgtattcacggcctatgatttcatccacagctttgctggcccagaatctttttttttgttttttggttagcatatctaggggtgcactatctttctcaaactccatctttctccaagttattgtaaagatagtgagaaagtgtatataaagcatttagtactgtttcagtcatatagtgttcttaatatataggagccaataatctcatcatattggatttgggagacattgtctgtatagatgtggatcatagagcttttttttttttttttttttttttttttgagacggagtctcgctctgtcacccaggctggagtgcagtggcgcgatctcggctcactgcaagctccgcccgccgggttcacgccattctcctgcctcagcctcccgagtagctgggactacaggcgcccgccaccacgcccggctaattttttgtatttttagtagaggcgggatttcactgtgttagccaggatggcctcgatctcctgacctcatgatccgcccgcctctgcctcccaaagtgctgggattacaggcgtgagccaccgcgcccggccagagctttttatctattgtttacagagcaggtttaaagattttgttagaaataaccctggcacataatagtgtctaactttgggtaagtccctaatctttcataagtcttcattttctcctatctgtgagaagatataataatacctaatcttcaaggtcgtgattaaggatgagaatagacttagcactaacctaaataaataatatgacaatttttaaatagtgtgattagttgacatttcaaagggtcttgctttcctgaccatatgtccgaactttaagaacatctaccttgcagctctctgtgccctgcctactgaatcttcaattgttgaactaagtgttatgatttaatatgttcatgaggccattcaaaatattagtattagttttcctttttgcttactgcccttaattcaacttaatgaataacgaaaaatatatgggttgtaggatgacattgaagcatgttccattttccatgcaaacttcgtggtctaatgattattgttacatatggtgccatttcacaaggtaatttaaaagtagtataaaaaccttatagattttgaattctcaattgtggtatattttgtcttatcatgttttctacttacatgaatttttgctcatttattttctggagggttgaagaaaattcagcataaatttaagaggctttgctcaaggtttgatgaataacaaatagcacatttggggagaccagaaaatgattaatgaaggagataataatgtggtcattaaaaggcaatattggcaaaacatacacaaactttttcagaaagaaagatgtaaaaccatttgagagactcatcagagaaaattctcatatggctttttttttcaaaaattttttttttcttgggatagggtcttactctgtcactcaggcaggagttcagtggcttgttcatagcttactgcaacctcaaattcctgggttcaagccatgctcccactttggcctcccaaagtgttgggattacagacatgagccactgcacctgacctgtattttttcaaatttcctagtagagggcaagtttcctgtcattgggggaaaataggcagagactgaaaaggccttagagaggtatatacctcatctaatatgtggcccatagaatcatttgtggacactttcagtactccggaggcacaaactcttataggttcttcacccgccaagtttctgcttggcagtttgtgcctatgtgccaaatactgatgcaagacagttttggtataatgcaaaattatcacatatttttggcaactatcctttccactctgagccctcctgccatctcttctctgctccagggatgctcttctctaggtctcacattcttcactgaactgcaaccgtagccttgcatagggctaaaaagctgatgaaggcattagctgattgtgtaattcctccctccacctcttgtgacaagagtgttaacccatctcccccaacataagttttgtccttttttaaagagctaccttcaagacacaaaggaatgaaaatagacaatagggaaatgaatccaaggcaggggtgcagaaaggaagcttgattctggtttgtagagacacattctactggaaaggctctaaagaactactgaggacaagaagatgtgaagaagccactttgctgctgccattataccctgccctctgaggctgaggctgaggagcatgggttatccttgactgccctacctcccatcaacttggagtgcttgaggggtcacttctccatactctggcctgaataccttctccagcaggtgaaggtgaattaccgctatcatctactatcccgttcacttcatttttatgcagtatacacttagaaatgtggtataccacatgcaaaaatgttatgaacacctacagtgaatagacagttcttaatttaacttaaaggtatttcaagaaggtttgtagctaatctttgacctcttatatatgttgctgtattttctctgtaagggtttgtttatctttgtgttttatagagttacatatgaaaattattttatattccttgagtccattatatagcttaattttcccaagaacatgtttcactttcaagaaatgtgtgtgtagaaactctgattcggccacttatctattttgtgaacattatggttgatgatataagctctacagaattttttttaattaaaaaaaaaaaagatgaagcccagactgctccatgcatgtctttgatattttttgtttgaagaagaagctctgcaagactgaagcctctactttggcctgtcataaataggaaaagctaaaccaacattgcagaaattagaactatcatacattttctgcagactctataatttagtcaactgactctccctttgtgaagtatgctgcaactacaaatcttttggaaacccatattatttgggttccatccaaaccttggatttgcatctatcattcacacgcagaattttgtatagatttttgatgtgccagttgttttaagtgcacttgaaaatggattagaaaaacttggcaagtgaaggtaaaacttcagctgcagcatacaattcttatggaagtttctattaagtaggcactctgaccccaatggtatgtgatgcaatgggattcataccaattactctgaaaggctttttctccttacctttattttagtgtcaaataacccatcacatcatacttgatcctctgatattgaaaacattcattttctgaataattggatgtggtgggtataagagcagaagactgctgaagaactccttttgtggacttaatgagatacaaaaaagaaagttcaaagtaatatgtgtgaaagcaatgggaattcatcgcaatttttgattatacttcccttgaaaaataacaagatgaaatgtttagtgcattagatttttaaagagctttagtcgtcagtcagtcttgatgtctgtgtgtttaaactgacaaaccactgttctgtagccggaggcaactggctgaaattaatgatataaaacacaggtaacttgacaggaagtcattttacaaatagtggttgtgacttggagaaaatttgaaattaagtctatcatggagtaagggccatattttgagagatattagtctttgaccatcaatcaaaacaccagcttacaaataaaatgcatgattttactttggtagcaaaatctcaaaggaaccatcgcgtaaagaatcaatgtcataggagttggtcatactctcttaggagaaaagcctatgtcaatggaagataaattaaattttctttactatttgacagcttgctagttcagaaatctagagtttagacttaaggttagcatccatttgcacttttgccaaatatggtatgtgagatgacttttcagggtgtagccaggatcaaccaaaagtaaaactctaaagaatataccaattctagcacctgcatggtttctcctcctatcatcctgcagaggcacaggaacctgagcatgggcggtgtttctctaggttgttcttgatcatgcttcagccaagggatgtaacaacatccttcagatcttcttgaagggctaatttgcaggtagtgtcattctttcacttttaattccttgagatacggataaacagacttgacttactgcttctgaaaggtcgctgattcttgcaacaatatcaatttcttgtgttaattctataatcctctgtggtcatctaatatgctttttatctaatttgacacataattctaaggtgaagctgaacctcctcaaatattggatccctccccaaattaaccatttgaggagaacaactatgcaacttcctttttgagcatttatgataagattttaatgcttttatttaaggtcgtaataaaaggggtatgtacatacttacatgtaaagatacaggtatgttcaggttatatgtataaaaaggctagttaataatctactgctagtggtttttaacattttaaaatatcccattaacatattttttatttctcaataatatttaattaaaagttcttaccaattctctatcactacacataggatgaaatggaaacacagagcgtgttttctgaccacacttgtaaatagaattataagcataactttttttgtacttaaagtttgccctaggcatatacaagtcagttcttctaagcaagatagtttcggttaaatgttgttatttgcttttggatagcctttgatcatatggacagaaataaatcaggtataataaaacacacacaaagtattccagaaaaaattgtatttgtttttgactaataagtaaatacaactatttttcttggtttgtattagtttttagatatttttgaaagaatggattcaatcttttaaaaattaagaggtaactgatttatgaacacagattaacaatcattttgagacattaaaaataccatctgtacatgagaaaattataatggtaatcaacaaaatttcagtacttcccagaatctggttttgaaactttattatgttttaggggaaaagctctcatttttctgtttgcttagatgagttagatcactcatttaaaatctgaagaagtcaaattattttttataaagatccagaataatagtgtatgtatttctaaataatctgaatatgtttacattggttttttttttttaaacctaggctaggaagggattacctattatctaacaaacatagtgcaactgtatagataaggggcaaacttcaaagattggatattgtttattatgtgaaagatacataggtcttgctatgatttggaagtcctaggtaactggttaggcttttcaggattgacagcagctgtgcagaaattttgttaaatgcttatcattttaaaaagctgtattcaaaatatttctaattttcactattttttaatgtaaatgtttttgagagtcaaagaagattctatacttttacttatgaagcagtttgttgttgtttgttcatttctttttttggtatggggtctttctctgttgcccaaggccggagtatgtagtggtgcaatcacagctcgctgcaggcttaaactcctggtctcaagccatttttctacctcagcctttctagtagctgggagtacaggcaaatgctactgccccaagctaatttatgttttatttttattttttgtagagacagggtctcgctgtgttgtgcaggctgatctctaactcctgggctcaagctatctccccactttgcctcctcaagtgttgggtttataggcgtgagctatggtgcccagcctgaggcagtcttaacgataatttgttttttctgatcaaaatctaccaaaatggccggctgcgctggctcacgcctgtaatcccagtactttgagagaccgaggtgggtggatctcttgaggtcaggagtccaagaccagcctggcaaacatggtgaaaccccgtctctactaaaaatacaaaatagccgggcatggtggcatgcacctgtaattccagctactcgggagactgaggcaggagaattacttgaacccaggaggtggaggttgtagcaagccaagatcacgccactgcattccagcctgggcgacagagtgagactctgtctcaaaaaaagaaaaaaatctaccaaaacaagaaaagagcttaatgaatgtatttgaaaaatagaatagtgtagcagtccatttagaggataaggatataaaatcagggtattgctttgtgttcaggaaacagagaaaataaatgatttttctttctttttagactttttcacagatattcatttgttatgaggcaggggctatagcattaattaataaataataacagcatggagcatattctttggaatgcagttcatggcttcttgcctgggacagcagaacagctgtttctgctaaattactggaatgtgagaagcagtgatgtaaacccttcaaaagcacagagagggaagggcttttttttctgtctcttgaattccaatgaaaagaagcttttatacacagagaattcagagtgccctgtactcttggaacataacatttcttctcccttgcatattcccattattcagctaggtcgttagtgtgagttgtttttaacagcttcatgggtctctaatgatcaagctgagatcaagtttgccaaaatgactgaccacttattccagtgatggatctaatgtagtctctcactttccactcttgtttcaagacaatatggctttaagtaagaattttccatatatataagtacgtatgtgtatgtgtatgtatatattatgtgtatatatacacacacacacccacacacaaacatatatatatatatatatatatatatatatatatatatgccaaggagccttattttggggtgtcgtgttctgagccccgacactgtctttataaggagataactttctgaaatatatgcaagtatttatgattcattgaatgagatatttattacgcatttatgaaaacctctgtacttctctatgtgtttgttagttaattcgtgttacatataaatatgcattaagtaatctgagccacagcttttgaggagcttggaatctaaagaatctaaatggaaagagacagagatgaaattgttttaagaattaactatgttttaaaatattaacaataacgaaagtaatgcttaaagagcataaccttcagcttcccactttgaagctggcagtcctagcatggctttcttcatcgtccatttccctctttttaaaaccttcagagcctttaaatgtttcccccatttgggtaattttatattaatatgtaaaccttgacataaaaatttggggattctttggtgattaggggtctagcaagtttgcttctacacacagagagagagacagaccctacctgggaagggaaaatagggcaaattatcaatttgtccaattagtgttgctggacatatgtatttgataatacaaataaatgtcgagactagtatttcttagcaaattcagccacacaattcccatcttttatgaaatgcatcctttaccagattggaaactaagaggaaaagcattacttctattaaaatcaattctagtttcccttcctaaaattgggcattacttatctacatcatatttggtacgcaattccaggataatcacattttccaactggacagggctctagttcaaatgcttcacctttcacagtgacttagaatggtttagagatttatccagtgccttgttcttggtgagtctagcatcttagtcgcatcctgtaagcacttgatcattgcctgccactagacactgagtgtacatggaattttagggtatcgttcattcatttacagcttaccataataggaaaatttagaaagtaaaactataattgctacctattctattaatcttgctgacattctaattcacttaccttgaagaatttaagccagcagatttggtgtcataagaatcatggactatttttagcaaagacttcatatcacttttcattgactggatgatgcaatgatgagacttgaaaaattagccaaattcccatcattgtgttttatcatcctgatggaagcaatgctgttgaatttcaagaggttagcataatcaatacaatgaagttacagcaaaaggggagatgtctctattattgaagttttacaaaaatattaaatgtttggattgattttttttttaaattgcacacacataactctgtggagtgtctaatagtcaaaaataggttgagtgtgatcaggataaatagctaatgcatgtgggacctaatacctaggtgatgagttgataggtgcagccaactaccagggcacatgtttacgaatgtaacaaacctacacgtcctgcacatgtatcctggaacttaaaataaaataaaatattttaaaactaggttgagtatgaatgagagggaaaacagaagtgagccagttcataattataggctaaagattatagtgaaatcagatcacatcttacatttcacattattttttctgtacttagacattaagccctcatttcgtttcacaaacttcccaccaatgatctaacccagcaagattctgtccctgcatgggcagccccagctacctcagccccgtctgtgtccacctcccaccctccagtccattcccttggcctcctccatctttctcatgcccatcatgcatgctctacccttgggtccttggtgcagagaggtctactctgcctggaatgctctatatagatatgcttgtggctgactctctgattcctttcaggtccctgaagaaatatcatttctcagaggtattgtgtctgaccacaacatctaagatagcaccacctctgccataagatagcaccacctctgcttatcatatgttgcctgtatctccaccggcaacatttcatcttcatttatttaatcgttgttttctgtcttcatgttcatgcactacaccataggctgtatgacagcggggtctttgttttgttcattgcaacatctacagcacctacatcagtttctgacacttagtggatgcttcataaataattgagagataatcaatgaattttcttcacgagaagataatttttttgatttaatcgtatgtatttaaaaccctttctgtagaagacatgcacagattgggggaacatattgcagaacacattcttattggggacccctctacactacaagaagataattttgaaaggcaacagtgaaggaaacagataaagtccctttcttcctagggcttacaaaatttgttttgtgtgaaaggtagacttcaatttaaaccttccattatagtaatgttacgcatattctagttcattagcacagtacataggctcatattaggcttaaagagaccaagaaagagaataaaaaccagaaaagaatatagataaattccttagtttgttaacagcatgaaattatatatttatcaagagagcatgctcctccatcacagaggcagggtttaataaagaataaaatatgttaatattttactcttaaagattactagtatactagacactctctcagatagacacaggtgagatagcctgttattgaaatttaggatattagatttatttttcctcattaaaatttttctctctctagttacttaatttgtcaatttgactgagagaaacaaaaatttttaaaggatacaaaaattttccttgatctacaaaaataaacacatgagacactattttgttttttaatctagcactgtcaagggaatacttcttataacaaactgtacctgccagaagttttgtaactaagcaatagtcacatggtctgtggctagcaggataattgcaaagtacttaaggacaaatcattcccttgtgtctttgtaatgactgtataacttgttccttaaagactccaatggcattatgcaaatttaaatacacttctacttcccacttacaaagagcatacaatgaatgctatatatgaattattgtttgacgctagaagataacacaatttaggttattggttctatgcgtttgttagtcacaaaatttcatgtcctgtgatagtgatgaaaagtagaatgttttatttaaatatttatctttcccataaaaaattttcttttagataaataaaaagaagtctgtctttacatattataactacctattcgtgtgaattttttaatataatatttcatggtatttttggcacctctctttttgtaggataccattgattcattactctaggagttttcttttccactacaattgtaaaaaagctaaaattctgaacatgatcatctttttttttctaattcttacatccataattcatgtacaaagttctccttaatagtcttctaactagtcatattgatcttttctgccccctgccccaattttccttaaacataacagcagtgttctatctatagacaccactctaaacatgttgctgctcttttgtttttaacaaggtaacatgtacaaaatggctaccttcatacacgatgcccctcaccccacacaatgcacatactgtgatgtaaaaattgtgacagaggaagaaaggttgtatatgtggatttggggaatctgcctgggtgtccccatattccatttcttttctattactccctccacacacatttattttgaagtaggcccatctccactagtattctttactttgtccaaacaaatgtacgtttctctttgtgccttatggataaactccaaattcctggcacataatgttccttctattcaaaaccttgctaaaaatcaatctcttgacactttctaaggcttctcttcaatcatgccttcattccttcaaaatgaatgcaactctctccatatgcagttgtaattagctttgtacattatgtttcttggcttcttgtgaatggctaatgagtacctctctctttttctctgtgaaatttataaatttaaattgctaaggagatctgagggtggaggggaagggggtctcactctgagatcagaaattgttttgtgaaaaagcagcttttgagagatgtagaggtatgggtagtataactaatgtggaggaatggctgctatacctgatagctatgtcactttaagaagtaggcaatgatataaaggtgaacttatgtagattatgtcactttcatgggcattttaattttctagtttataaaatgtaaaacagaaacagcaggttaagtaaataaatgaaactggttgggcccaagaattgcttgctttcttggtcattttgcactttggcattcaatagacaaagcgtatatggtacatttattttccctctttactataaggaaacaacacaaatgccgtaatacgtggccacggacacttgggacctgctatgtggaaagcaaatgccctatttaaaaaggaccgctgcaatttagttctatctgttgtcatgtaggaatgggagcacaatattgacagactggagttttcagaagaagtaagcagatttttatatgagatctcctgacttctaaatgtgaattctaacaaaacccaaaccccaaccatgtggactgaatgaaacacaacaaagccatatccggcccacagattgctgtgatatatgtcctgaagatcctttctgtgccagagaactatgattttaaattccttgataacagaaaccgtgtctactctttcctcttcaactatatcaacaaagcattttaactggagatcaacaactgatcatcagatatttttatcacatcaaaactttcattggattgaatttttgtaggaaattttgacctatagaggtattttcagtggacagggagcattggtaattctgaggacaactatttataagaaaaggctcaaatgctgaactgtggaacatagaaaagatttagtagcatgcaaagaaaatagatcgaagtagctggagagaatgggatcatgtctgggagtgcaggacgatgagtaatcaaggaaaagggagttattcataatagtcagctctgctgactggccttttgaaggaaaaaaataaaaaatgattagtatagggaagaagcaatttgatttggcttagaggaggttattggaaaccttggaaagggtggcttttttcagtagttgggatggaagccagactggagaaggttaaagggattagaggtgagaaactgggagatccagaggtatgctgcttttccaggaggttggacacaaaggaagaagggctggggtgagagtggaggaatccatctgtttcagtgaagatggcgtgctggatatggggaatacctgtgcatgcttgaagttggatggtgatacatcctcttcattgtccttggtatcttggaaagtaagtgattgtctccttttgacttgcttatcttgcatatgcgaacccctctatggtgtgtgaataaactattttgatagtttttgggtgggatgattaataaagttatgactcattatttgtgtatattcagaagttcagtaccatcgctaactcacagattacagaatatacgctatctctcctgtgtctgaaaatcactctagtctgtaagcacctccagatcccaggaatgaatccttaaaggcaggttatgcttcaataaagttactgtggggtcagtctgagccaagagtgttctgtgattatttttgctgattgttcagaacctgatctctgcctgtttacctgcagcccttctactgagttcagtgtctgtcttcttcctggggccaccattattggagcggaaccatatgcttctgccctggagactgcagcattatatcaggatgccaagagctaaggaagagctcatgtccccaggtgtcttacagccatttccttttatccctattgaatgttatggcacacttccatgttcacaaatttaaatattcctgctggcctattatttgcagaaaattaaacgtaactgctgattgggaagtatataaataaatataaataaatagaaatctatctatttgttgaaattttctcaaaaacaaagctcacatagaggaaggagactagtggctttatttagaaatggtgattttggatgaaatgattgatttttttgtttacagtacactatcaggttatgtaacatggtgacataattttgtttacgttaaaaatagcaaaataagatggtgtaaaatgtgcattcccctgacttcaccatttatttatttcaaatattcttctactctggtaaagctattaaaataggtgactgatgataatccatcaaacaaacatttatttaacacacactgtggattttgccttggtggcaatggtaaacaatttgcacatttgcttgtatctagtaggggatgtgagcaattaagcaactgcaatagagtgcagcaagtgccataaaatactatgagagcacagagtaggcaagcacctgatccagtgggacagaggcttctcagaggtaatgacctttgggatgagacctgggggaggtgtagaaggtagccaaacaaatgtggttctgaacagaggggaaaacaggtgagactgtccagaggtcagtcagaacacagcaagttagaaaaatgcagagaacacttgttatctctcgttcatgcaacaaacacacatattaagcacctatgttgtgccaggcactgtgctaggcactacgcaaaggtgactgtttcatgatgtttactatgcagtcaggaagctgatacactaaataattgtaggatggtatataagcactacaatagagacatgttctaaggacacagtggaacaaaggagtaaaagccaattatctttggaggtatgaaggaaggctggagatttattttgcaacaactcaagtaaaagaggcccttttttggtttaggggcttaatttataaattgaccttgtcctactaagataacatgtttgctttgaagcaggttttgggataagaaacctaaaataaatgagaagaatgattttatctgagacaacaaaaaatgcgtattgtttccacaatgaggaaaaatgattcactaactcccgggttgcaggaaagataccccaaagaccatctacttccattacatattgctgtatgtgaacccaatatacccagtctcctcaggtaggggattgaagtactcagtcaactcaatcatggtgtattaatataagctaatatcttggaataacatgttgctacgtgttctgttagtgcaactcagcttctaaagacctgatcatatctggtgtcaacacaatagagtggatttagaagataaaaataaaaagctggatttagagtaactgaaaaaactccaggcactttgaacatatacataagtgtggattatatattacttgctattaattcttagaaaaataatattttaagaaagcaaaattattctaaaggaaagactcatgataggaggattcgttttttgtttttgttttttttgttttggaaacagggcactctgtcatccaggctggagtcagtggcatgattacaactcactacatcctctaactcctgggctcaagcaattctcctgcctcaacctcctgagtagctggaactataggcacacacaacttcacccagctaatttttatttatttatttattttttgtagagatggggtcttgctgtgttgcccatgctggtctaaagcaatcctcccacctcaccctcccaaagtgctgggattacaggcgtgagccactgcgcagccagatttgggtatttttaaaagatagctataaatgaacgtggccggagttcttctttagaaaatgaaccttgaggcctcaagaaactatagtaattagtgggtctgaggcccaccaagatccaatgaattgaagtgaactgctcagagttttatacccacagagagagcccgacctattcgtctcttcttgttcttgccagtgcttgctctctgtccatccatacctcagaatgactgacttatctcgacggccaaaaacaccactctcaaaatgccctagtagattaaagaggtacagttatggagatgtctattgaccttttcttaaattttgtgagagaaacaataaaacatgaatacctggtcatttgattagcatccatacaattttacatggttctcattgttctatttgacattggaatgtataatctgctttactttttaatttacttgctaataagatatagttttccacatgaaaagttaataattatatttattatctaaaacaaaaatgcaaattaaaaatcttgtgtactatgtgaattataaataccatgaaagggcaacaaaataggagtgtatagaagggtaatattgaaaatgaagtgtgtgtttcatctgtagaactaacataaaatcagaaaagagtcaattgtttatataactaaaaaaaaccaaataatatattagggaaggctcaaccatttagagaatggaatgtcttatgtgtggctcacttgatatcttcttaaacaaggtggtcatctctagcctgaatgaactgtttaacaaggagaatgtttgacacaagaacctacgtaattttccgtagctcaattccttactgatgagatttcaaacaacaggactggtttggggctacctgattaggagtctagaatatgtctgtcagatttgtccttgatgctcaaattaggtaagatctcaaaagatagaaataaaactaaagtagttttaaaagcagagaataaaaatcctatacagaaaagtgtgataccttttgtaatgtaaatgcaggattggactcagtgcgagaaatgaaggaaaagaacaggaggaaatctgttacaagctgaatatgggtcagtaattcactgccattgtttaaaaaaatctgcatcatgatgactatggcttatattatttctatgtttgtgaatggccaaggtactctaagaactaaaaggtaagactaaagaatgttaaaaaaataatccaaataataggaaagaaaggaaaagaaggccgtagatgagtacaggtttaaaacatttcaaaagatgagctgaaaactgccttgtatagacacttttaagaataggaaaagatttttaagtgagggggatgttgatcatttccactttatattgagatggaagaaaaatgggcttggtgaaaggaaaaagacattttggtgggctatcagagtgatagatattatgagagacaaagagaatagtaaaatgaccatcctggaaagcttcactaagataatgaatggtcatttttctttaagatttaagatatttgcttgcttgaaaaatacttaacagctgacttgaattgtctgccagttttgtgactctaatttgaagtttgccaaaaactctttaaaatatattacaaattttaatttaaaataaatggagggaagagctatacaacattagtatctgtgagactcctattaagatgcattagaaaaaaattacttttataataatttattaattggctcaaaatttctctttattgcatttttctggagatatttatctttccctgaacccattcattcatcttgccttggatctatttatttaaggacagagaggatgccgtggggactgttgcagggtaatgggcagatgggctgacttcttgcttattagtaagctgggatgatctgactctaaacttcttcctaagggatagaggcacttaaaatgaggtttactcaatcatggaagtataattaaagtaaagatattatttcatctccctccctcccaccccatttctatttttttggtattcttgtttgacttgatgacttagtgttatcactgatgaaaccttaagtagaccagtggtttgttcttttgttcttttgttatcaggatgggacagatgtaactgcagggttcagcaggaggtagctaggagaagcttctcattaaacaagaattgagaaatcccatctgaacacctcttctcctattatttagtaaatggagaacacatgataaataaaacagagacattcttaatatcaaatgcaagggtatgcaaaacctgcaggaaactctatgtgtgcttttcttctttttttccatctttttctttttgaaaacaagacatttgtattcactcaagttaatcatagtgtgttttcaggtaatcataattagatgtaattactgtgtggtcaagttatagcttaactcctcgatgagcccaatcgagtactttagacataaagaacttctcaaacccaaacatcccaaaaatccttgacaggaacgctaatgctatcataaatgaatcaaagcattattttgatgctaattaacagttctacttactgtaccactctaaggctgcacacactgtttgaaaaatatatgcaacttaaatcataagcttgtttgttttttgagagagaaagagatatagaatgttttggattcatgtcttcttttgttgatctaatttttgaattggtttctaatatagaaaagctgttgttagatggcgttgtcccagacttggggcacaaactgtgtggagagccaaggaagggcatgggttaaaaatacagaatgtgaggcagtggatactgtcttgcctctgagtccttttccagtgccgggtgttcttcattcccatcttcacccttttaactgttattacagggggattccatgaggagagggtaaacccttaaatttccgagtctggtactgttggtgttgggactctggaaacagagtctcaggaatgattatatggtcctcacatctttcacttagcaatgagtaagtctgtaacatgactttgaggtattgccaaaaagcagctacttctgttattcaaagtcagtgataccagtgaaagatttaaaaatcactttagagagaaggaaaggactcttttacaattaaatgcgttgtatttttaaatatattattccaagagacagtcaccctgtagtgttttccccctgatgggatagtgctcctaggctgagttagaatactcactcaggtgcttgtagatagatcttttctgaaaatatctgctatcaagcttttagatgaaacattcttctacccaggaaagcatagagtttttctagagaaatccgattttggagtgagctttaggagctcccagctgacattcactatatcataaaatagcttccagtatcaggaaaagcatgtgcgtccatgtggaatcacaagcactactccatttgtccacattgggccgtttaagttggattacacttaagaaaaattaaatggtctctctcctgtatttgcaaaactacatattacctggccttaggaacttgataaatagggaccaaggaataccatgttgccaccagtgtagcataggataacatctctattttgtattacatgaggacagaatggctgagtgtgtaccaggattacaacctcagaagtcttaactatagtgtaaccttcttattttagaaattaagacactgcaattcaggaaaagtaagttgcccatggttataatccaattagtggtcgatccaggaatgggattcttatgttctgcctctccaataaagcagacaaaaaagctcaaggtctgtaatggcatgataggggaaaagtgctctttaaggaattaaatctaggaaacacagagaaatacccaaacaaaacaaaactcgtcacacatcaaatgataagttagtgttattgtcacatgcctagttatatctttggagaaaagagatttatttctcttataatagttacaatttgagaaaaaagtgtgtgtgtgcgtgtgtgtgtgtgtataaagtatcaaactgcaaattggtcagatggaatttgtcacttttattactgccgttatccaatattatgaagaatcccatccatgtatgcaactctttatgataaaaaacaaatggatagtttccatttaactaatctaactgcccacttgttactagcagtcgactcccatattgacaaactccagcaatcacctgccttgattctctccttctacattgcctcactcctacaccatagatgcctggctgtctgaattataggtagaactgtcttaactatcttgaacaatgtgtcttggcttgctggctgagcctccactgccatccaggtctccagacccagtgggtagatctgctcttttcctgcttgcttcatttttctgtatgttgccatgccccgttagctaatagaatagaatgagtaatttgctgggaattacctaaaaagttcaagaggaagaagctctgactcccaggaagacctgggttaaatattggagtaggaataccttgaagatggtttgagataggattcttgataggaacaccttaaggatgacgattatatcaagagcggaaatcaagataagtttttactggatcacgagtgttccttagattggcaaaaaagaggaatctgctgtttgtttatatttttatttagcttataacctgatgtagtttttcaattaaactaataataactgagtaatcctgatttatctccaatctattcaattgatcaagaaatacacactgtctgctttgtgaccagaatactggaaagaaaatattcaggagaaaagactgcagacaatataaagaaacctcctgggggtggttttaactttcctaggtttaagtgaaagtgggaacacatttttcagtgagaagagagtacctttttatgcatgtccttgagggcaagaatcatgtctaaattatctttttatctgtagaaaggagaagagaagctggcacttagcaggtgcataataatgtttgctgaagaaatattgacaatctttctgggaaaatgtagagagtgagtaaattacctgattattttccacttaatgacatccttctcttttctccacttcctggcttaggctaccatgatggggaaatgtagtttggtaacactactggagtatgaaattcattttcctatggaagaaatgtttaaaacaacagtttagacattattaaatagacataataattattttccattagatgtaattgaaataataatgattagatataattgaaaactgttttgcagagaacaaatgtttctgtgggctatctaggaactcaaggcatatataatgtaatttctaggaacaagctttgtgttcaaaccttgagaacctcatcgtttttctaacttggcttgacatctaccttccattttttttccttttttcttaaaaagtaggcttttctactattctagatgttatgagtctgtggaagaaataacagataccaagagtggctttcactcagaataaaatgatatgtatcaaaaggtaccttttttttttttggtgtgtgctgcaggtgggttgggaagggggtgttctggatttatccagttggaaagaaaatacagaggcatattaagcagttaatgagaactagcttgtgtgattaatatagacaagaagtggcatagtgatcaaaagagaaagaaagtttaatgtagtttgccatttttagaaaaagcttcatagtcagtttgggatttcaggtaggtaggttttagggagatgaaagaaaagaaaataggtattttttaatctggaaatttttcaccagcccaggaaaataggatttgatgttcctcttagaagctctggtaactcgtccttaataaaaatttgatcatactgtattttgatttatctatctccttttatagatattcgagtaaaatgcttgaaggcaggaatgtgtagatgaatttaggcaatagttggagatgtttcacctttattctgaaaatgctgaagactaaaaatttttttatgaagaataaaaatacaactgtctggaaataagattggaggagaaaacatgaaggcagggagatagcaaatcctgttgattaaaataactcagataggagagaaaaaggggtggagcaatagagaatggaaggaatacctaaaatgtgttaacaaaggaaaaacaaaatgttttatactggatatgagaaatcggaaagaggagagggaaaagttaatagacgttcaaacatagattttaaaattttctgtccaaattagtgggtaaaacaccatagcatttgtacaactgccaaaactgtttttcaggtctaaataatttgcataattactgtcagcatttctttgttccttcgttattttccaactctatttgttgaccttgagaaaattagtttccgtagtctcatacgtcttccaatgtctgtgttttctagtggaaaaagaaaagggaattgaaaacgaagacagctacattacattttgtctgatattgaatcactggccatttaatctgctccttaaaactctctttgagtcattttttccactttgaaatgtagcttcatagattcaaggacttttagtagtaaaaaaaaaaaaaaatagaaaattatctaggagtttagatgccacatccaggacttgaaacaaacaaaaagaaaattatctaggagaaaaattagaaagtaatcacacatttgaagagatacagaaactgaggaccaagtaagttatatgatttgttgtgagtcctgttgtcagttaaggacagcatgaggcttaaaatctgagtgtgctgaccttcagccattgcttctgattgtataccatagtgatttgggtaagactacagataatcttccaaatgtttataattaagctaactgttacatcttgctacacagatatgtatgcctgcaggaaatttgaaggaaatctcatctagtttccacttaaatttagactgtgacacaaagggcaaattcacactttgagccacaactgcaaaataacctatattttttgaaactttctgttgaaataatgttctgtagatttcttgcatttctgtacatcttgcaagcagaggcacggactgtctttgttctagattatttttttccaagatgttggtatagcaagcagcacagagaagcaaaagtctggcatgcttactagccagtataatgaagacaaaggttccctctggagcaaagtacacacatacttattgcccactataaaagattcaggcttcctaaactcagggtttctctctggtacacagcctgctgaatgtgctggcatccatctagcctgtacacattactttaattgggagcagggaaactgacacaaatatgctgatgctaatgttacttgcagtggtgtataataatacagctctttgtttctgacctgggagtctcatatcttctgccacaatctatgagattgtagcaaactaacttgttaacttgcaagtaggataagatctcagctccttcacagttcaacactttctaggctgacagatttgtgggcccaggaaatactcttataattggttaggcataaataaaattggaaatgttgtaaatcaatggacataactaaatttttacttagatttctacagttttaattagaacagcttaaggtctaagtgtggcattaatattctgagtctcaactgattagatttgtgaaatactattatacttagttgctctcatcaatttcaatctttgtagcattaaatgtattattattgttatactctaaatgtttttgcaaattaacaggctggcaaaagttatttttttgacacttatgcaagataaactggcaagcagatactatatagtaatttgtatagtcaatgtgaccaaaatagaaggattgaccatactttggttcctaagtttttttgtgtaggacttgatgaaatttcttgaggaggattgtttttcctacttgaatttggatactctccaggtctgattatcagcacattatcaaggcccaagtcacaatttgttcttggtagttaagcaaattaaataattaaagtaggtattttctgttctagtgttactgtaagccagaaacatgaataaggcctaaatagaagagaacaagggaatttatcagttatataggttttgttaaggtccagcacaaatgatatccaatatttatgtaaatcagaactaaagactaaattctagactgcagtagcaggttgttaacaagttaataaactttcttccaactctattatgtgtttaatcattttcctagtatagagtttgaagctaacaaacaataattatgcttgcactacatgtgtccctttttagacattagttcaaattagttctaagttatgatatacttttgtttcatttttaagcttgttttttaattatcttttttttgtatagaatttaaggctgttacgaggtcatatagatgttacgtagaagaggaggggccaaggagagtgaaaagagagaggctaaagaaagttcaaaaaaagctgcactgtagtttaatatgaaagaattccggtgaattgattagacagtagctcacattcagaaagcaggatacgtgaaactcatctttgaagatcaacaaagacttttttttgagaagaaatagtagcgtttgacccagtaatatgtaatcatttcagaaattcattgataactgtttttttttaaatgaataaagggaatgcagaacattgcagttctggctagcagagtctgttcctttgggaaaagacccccttagtatagtacgcaaagtcagcctgtctgctttctctctctctggcctactttacttgctggccatctgtggcctagtacatttcccaagatggctccccttccatatgctcttcagcaatgtgacctttccacctacccctcaacaagaggtggcgtcgatttcttcaccccttgaatctggaagggccctgtgactgctttgaccaataaaatatggcagagcccttaattggacaggcacttgccatttcctggcctctgggaagccaactgtaataaaagaatgcaactatgttcaaaccaccatacagtgaaaacccaagccatgtggagaggccttgaagaatgaaatgccacatgggaagagagagagagcaacaagcaccaagaaatcaggtatgtgagtaaggatgccacagtaggagtagatcctccagcctgagctgccccagctgacaccacatgtatcagaatgaatcagccaggtgagcccttccttaatccccgactcacaaatttgagagaaaaatgaaattattttaagacagtaagtttatgaggtattttgtgaggtaataggtaattagaatgccaccattcctgactggatggtagttaaaagttagagaacactaaaaggtaataaacactttctgttgattttttcttttactaaatggaaggaattttagtggtcagtcattaattattaattcacaagagtgataagatagtaaactgacttcctttgccatctattttttttaatcataactatttaaagtctccttgaagtttttatgttcgtattatctttggtttccaccattcttgagattctttggcaaagggtaacattgtgaaaaacaggctcatctccaagttaatccttttttgccttcttctcctttgattccattatagaaacccctgatcttaacttggggtattttgcagcattttgcaaaacaacaataacaacaaaaaatcgttttctcttattcagctctctacttgtaatgcctgaaacatctgaaacatttctgcctcatagataatgatttacatattttttttttctcactctcagagcactgagcaattgctgggcctatgtgtttgctgaggagtgggggctcctgaattcattttagccgaaagacaccccactagaatatattaacactgaattaggaataagaaaactgagaatttagttcaaagtgcctaactgtatatgcaaccttgagtaggtaacatagcctagggggttccaattttcttacttactgagaggtaggagctggatacaatggtttctaagttaccttctaacattgggattctttgtcttcttgtaaattccatcactccatgggtacatatcttttaaaatatgatttacatttataatggacgtaaatatggaggccctaggttatttgttgactttttatcaatgggcccggagtttttcttttgttaaaagaaaaaaatttgcgataacttatttttaagctggtttaagatagaaaatgtttacagtaataaattaagttgcccctgaaaaaatatgtctttcaaggacacgacctgccccaatgtgctatttatttgcatttacaggaaaacccaattataacagctattttcaagaactaatatcactagagactgaatgtatagtagagcaagcagatgataatgcgtcctaaaaaactgacctagccgggagcatgtacatggtgagctcacccacattttgttattcttcagtgaaattctacgtttcatctaaaatattgttgctgatatttatgtaaaataagacatagttaatcactaggctaaatttaatatttgtctcaggtgaagtgaggtgttaaaattgtatgttatgatttccaaaagttctctttttagattgcacagggtaaattttgcaaccaaattacctctgtggtaaaccttatgttggactggtataaagcgaaaacaagcaggtccctaaacaattgctgctgctgctgctgctgctttaaaatccatctcagtgaaatcttgattgagctggttgcaattcaggaaggagacactccatatttacatcagacacaaagatctttcctcccttaatcattcactgaggggagtagttgtttagtggactcatttctctctggtcttttacaccttaagcaagaatttatggctccttaatttcaaatcatagcaggtaagatataatgccaccttttaaagctcatctgtgtgaagatgaccaaggtgtaaaggctacttagtgaggtggcatgagtcctgggtcctgtcttccctatgctaactaattgtggtaccttgagagcagtccctaatgtttttgggtcttgttccctcctttgtcaaatgaaatggatttcacaaatttttctttgagagcccttccccatgtgagacttttgtgatgatgaggtctctttctgtttaggcaagatgccttcccactgtcctcttcttgtttctcacttcctcctaggacttgtgaatataacatttttggtggtgacagactaatgcatctgtccacccctcatcatcatctctctacaggactgctgttatagactcttagatacctctcatcatatccattcgctgcttagttcccattcaataactctttataaggaatgctctttacaaaaacttcagattttatcatttcacttatttctttaaaccattaaatggctttgatggcttttaggtctaaatcccgaatccttaacatggcctgttgagctcttcactccctgcatctctggcatcttcccatgccccactctggtttaatttaaatgtgctgcaataagcacacatgatatattttactaaggaaccactggtaatatcaggctgaggatgttgctgggtgtggcttctcaaatctctccagctcttcatgggagatgggctcagtttggtggtcatggaattcttcttgcctaggcataagactggttcttctatctccaaacatattccctgaaacttcagaggaagtgtgttacatggttgcaaaatctgccctttttagccatatcaccagtatataacatcctagttttagggaaatattttccataagctaacagggccatcttactacatggttcacaaggtatgtaataatgattaggtatgacacatggatactatattagtttaggctgctgtaacagaatactatagactgggtggcttaaacaacaaacgtttatttctcataggtttgaggactggaatgttcaaggtcaaagtgcaggcagagtcagtgtctggtgagggcccaggtccactttctggtttgcagatgactgtcttctcattgtatcttcacatagctgagagacaaataatctttcttctgtttctccttaagggcacaaatctcattcatgagcagtccacgcttatgacctaattacctactctgatagttaattttatgtgtcaacttgactgggttaaggaatacccagatagctggtaaaacatgatttctgagtgtgtctgtgagaaagtttcttggaagagattagcgtttgaatcagtcaactgagtaaagaagattcaccctcaccgatgtgggctagcaccatctactccattgaaggcgcagatagaacaaaaagggagacgaaggatgaattctctgccttcttcagttggcacatccatctcttcctgccctcagacatcagtttccagttctaggccttcagactccagggcttacaccagcctctccaccctcaccctggttcttggagtctcaggcctttggcctcagcctgaattacaccacaagctttcttggttctccagcttgcaggtgttttattgtgggacttctcagcctctgcagtggtatgagccaatttccataataaatcccctcatctatttatcgctatatatcctgtttgttctatttctctagagaactctgactaatacacctcccaaaggccttgtcttccaacaccatcacattgggggtttgaatttcaacatgtaaattttgcagggacacaaatgttttgtcagtaacagatacctacgcgggacactgagagtctatggacaaacatgcttgctgatacttttaggcctaggatggagtcactactgcaggcctggctggaagctaccattcaactatgtgggcctcatctcagttctgccagtgtcatggtcttttccaccagagggcattctccagtgctgttgtttttgctcaaattattctttaactcccacttacaccttccttttcatttagataatttctatttacagctcagatcttctcagtttacaagccactttctctcagagacttttcttgttctttcagactaggtttggtgcccctgttttatgcttctgtaataccttatctcctacagagggtgttactgtatttctggttctatgaccatcactagctttagattgtaagctctgtaaggaaaaagattatctagttcatgccaaagccccagtaactagcatggggtccagcatatagtagtcagtgaccccccaaatatctgttggatgaataaaggaataaataaatttagaggagaaagacataggtgagaggaacaaaaggatctcaaggagggagaagaagtacttcttgctgatgctgatggtgtaactactaagaactgggagaaataaataaaaaaggcctcttgcctggcccatgatcctcactttagcttccaaggaggtggaactactaaatagagtccttccaggtcttctatggaaaagaagaagtatagactaacactaggacagacacttggcaattcagggagggcactggaggagagcagtccccaggcccagaagtagatctgaccccaactctgtgtacattccaacaaataccaggggctttaaaaaaaaaaaagagacagggtctcactatgttgctcaggctggtcttgaattcctgggcttaagtggtcttcctgctttgccctccccaaagcactgggattacaggcatgagccactgtgcctggttgaccagtggctttttcattgtgaattttgggaagctggattttctctttgttatctttatattccatatcttttccccactgataacaaaagtataaaaaagagagaaaaaagaattcttagggaatgtcaaaaaagtcatgtgtttgtttgtaagacaggcaggcattctgtgtttacattctcagtgagtcaagaagggagactaccatggtcagaacaatgacttttggcaacaaaaggacacaaaggatttattgaggaagagaggcaggaggaaaaggaaagtggacagaagctgctctgggattgtgattctatagatctggcaggcattcctttttgctacccacccctaataaacaatatttttctcctcatctcttctgatctccctgtaattccttttggttccctttcttaccagactagtgcctttaatacaggacataggatcaattttcaatagctaagaatgttggtgcaatgggagtatcgttcacataacagacatcctaaagtggaaatataactatgtattcccttaaaaacatgggtagatatggttagttaccataggctagctgttttcataaacaacaccataatctcagtgattaaactcgcatgagaaaaagttacttgtgtcctatgaggtttaataaaaaagggaataagaaggactctgctccacacagtaattcagggattcagcctttccccagtctttgctcttccaccttctaggttttgtctgcctgtgtattgagctagcacatgaatagagattactcatgggagggtttattaactaggcttcaacgtggcgtacacttccacctacattctacaggttagaactaaatctcaaggctgcaaccaactataagggaggatggaaaatataactgtactagtttcctagggttgccatagcaaagcactacaaactgggtggcttaaaataacagaactgtattctctcacagttatgaagactagaagtgcaaaaccacggagtcttcagggctatgttccttctgaaggctctggagaaggaccctcccctgcctcttcccagcttttagtggttgctggcaatcattggcatcccttgccttgtagctacatcactccaatttctgcctctgtctttgcatggccatcttctctctgtgtgtctctacatctagttttttctcctcttataaggacacctggtcattgggttagcccaccctagttcattatgacctcatcttaactggggcttgaacatatcttttagggggacacagttcaatccacaacagtagtctagctatgtgtccaaaaggaaaaaaaaatgctttggtgtcccctattggatctttgccaagttaagattttctaccataagtaatagtgagtgggaaagccttttgagggctttagagaactgagattttttaacatagtttctgtgaaaaaatgtttgtaacaacagacaactcttgactcacaaatggagataatctacctgtaagacatcaaggctttatacttcagagaactttacctcactcaaataatgttatgaatttaaatagtgtgttagagttcttaatactattaacactcatggtttaataaaatagaataggcatatgaaaattagaataatcacctctaaaactccatgcctataaaatatgcttaacaaaacaccaataaagacatcttcatatttctgcctgggtcattgtcatctgacagcggtttcttttcctggcattttccatcttagtctttgtccatcttatactttattaagtggctgcttttcattgaagccagctatgatttaataaaagaacaacagccttcaaatctgatgaacttaagctctatatcttattaactttcttactttggacaagtcaccaaacccactttttatttcagttttatcacctgtactgtggttgacactaaccttgtgtggttatgagaatcccgtaaagtcacttagtatttattgagtatctgtcatatgctggcactcttataggtacttgaattatatcaacgagaacaacaaagatctctgttctcatggagcttccattccaggagctaaaagggctttatgaattataaaatgcaaatgtaaggtattatcatcattgctattgtgcctgcagcaactcccttttctcaaatatctgtaaaaatcttatttaaaattatatatagctcttagatatcagaaagtacataaagggaaagaaaaatctaagaaataaaaaataatcttttagatgtctaattgtaaataaaaactcatagtaagtactgaaaatgtttctttactgtatttaaaaatagttcctagtcccctattatatgccatgcactgcagtaggctttatgtggcatgccaagatagatattaatcctgccctcaaggagcttagagtccagttagggacatgcccactggaaaatgtacattaggataggaagtgaagaatactcagcagacaggcacaaggaaattgacggaaagctttcagaagaggaaagatgactgcccaaacacttataacatcttgacattttctatagaaaatgtcagagagatatttacccccggtgttgtaattgatacaatactaccggcacctgtttaactactggctgggattttcattttatacagaatttagatgtttacatctatgttatactgtatagcatttgggcaatactttgtacaggaagtgcattgtatacaagtttaagtaatatttcagaatgacactgctatggcttgaatatttgtgtcctccaaaatcatgttgaaacttaacccccagtgtgatggtgttagggaactgggcctttaggaggtgattaagtcacgagggtagagccctcgtgaatgggataagtggccttataaaaggggtggagggaactaggtaggccctttttgcttttctttccttctgccatgtgaggagagtgttcaatatgccatctgggaagaagagacctggccctcaccagacagtgagcctgctggtgccttgatcttggaacttcccagcctcagaactgtgacaaataaatttctattatttataaattacctcgtctcaggtattttgttatagcagcaccaacacactaagatacacaagcagccagcagggtatagcagactgtcaaattgagaagccaaaatctgagaatttacaaccatgcactgtatgtttgaatgttgacagaggaggcattgttacaaaggctgtcagaacataatcagaagttactaattcataaactgttgaaatacgaagtatatttgttttcaatttgcattgcagaggtgatgtccaagcaatgattctattactaattgggctaccaaacacattgattgaaaaacgtgttctgacttcaactgacaaagaacattaacagcatctctctcctatagatccagttacgacaaaggttttccattttgcttcttcttttcatggtataatagtttcctcaacatttttgccaagaagttcccatctcgggacctttgaactgctattctgtttgcctagaatattcttccttcaggtaattgcttggcttggtccattcagatttctaaagagcattccttagcaccttgtgtgctaagcacagtaacatgtgtctctcatcactccttattctactttttttccccagagcatttgtcactattatttttgtttaccacctagttccactgttagaatgtaagcactatgactgcaaaaatgttttgtttatcatgatatccacagtagttagcacaatgtgcctctagtgctcagttcctggcacatgatagtcatccaataaatatttatcgagtaactgaatgtgtccaagctgaggctgctcccaagaaaggtcaagaaaggggcatctaatgggacgaggtgagggaatgagtgaggggttgggagagcaggtggttggggagtaggaaatggcatggggatttcagtgggggctgtgaccacagtgggagttgggcttctggaggcttctgtagaagctctttggggttttgttttaaaaaaaaagagagaacctttgcctctttggcctggctgtgtgatccaagataccactgaagcaatggtgagagaatggcattggtggaatgggtctgctgaaacaggaggagggtggagggagtgaggggcagcaaaacagagttgactccagatgatgacgtggaggggccttagggtggtaaggcagagagaaggagcaatcctaacagcaatggggaaataggtgaatttttgttgctctgtctgatggaaaggtgagttctcaactgctgcagtcattttcacataaatatgtttcttaaggtacactttcagagttgaaaactgtctatatttgtaataataataagattagcaatagcaacacatttacataggcaccttccaatttcaaagtgcatttatatacactatctcgttggtttaatccttactctatttttacttctaagtatgctgtgtattatactttacgttcattgtctgggaataagggcaagtgtttagaatatacatatgtgcatttgtacaaagtatattaggttctggttgcatctacaagtgtgtatatatatatatatatatatatatatattttttttttttttttttttttttttttttttcaaggcggagtcttgctctgtcaccgaggctggagtgcactgggggcaatcttggctcactgcaaccttcgcctcccgagttcaagcaattctcctgccccagcctccccacacctggctaattttttttttttttttgtatttttagtagaggcagggtttcatcacgttggccaggctgttgtcgagctcctcaccttgcgatccacctgccttggcctcccaaaatgctgggattataggcatgagccactgcgcccagcctacaagttaatatttttaaatatacaagtatggccaccttaatcaataagtgaatttgggtttcttgttataaaaacaagccccatttttttaaaatcaagaagaattccagaactttatagtatacaccccttgagaggagggattgtgttttattcatcagtcaatagacacaattaggttaagaaaacttttgagataagttataaaatattgcaactccattagttttttatgtttttattactgatagtgtcttagatatttaacaagccttgattaactgcctttaatgtgccatggattatgcttggttctgggaaattcagttctccccctacccagacacacacacacacacacacacacacacacacacacacacacacacactcctgatctaaagctcttggcctatcaagaaaagatggttaggtatctgggcagttgtgtaatacattgtcacaggtatactgtcagaagcttacattggaaagagaaggcacaggagaagagagtggttggggttatctggaggttggagaagctgttctcaaggctttatgacagaagtcatccttgagtgtagtttcaaaagattatattttaaaccaagtgaatgacatctgaaaaacatagctttcttatattcactttaggatattaataaccaatccttttccttaagtagcctcttgactggctaaatgtacctcttcaggttcagagacacattctagaatgttacagttttctcattatgcattgtatctgttccgtgttgaagtacctgtaggaagaaaattaagtacaggttttgtgtgtaggttgagagctgatcctatcaagggtgtgtcagaaaccaaccagcagagtccccaaatcattcgagtccctggcattcttttttcaaggctttcttcattgtaaccggttcctgatggtaattggttgaatcagatttaacaatgcagtcagataaacagttgtggcagctgctgccatggcaacgtcaccgtccttaccctcccagtgcgcgccccttccccacccctcctcctcctcctgctttcctccagtaagtgcatacccgctagtggtctgtacaggcggcacggtttgatggcagagatattttctttccaaactgttcaaaatgatgaacgaagatgcagctcagaaaagcgacagtggagagaagttcaacggcagtagtcagaggagaaaaagacccaagaaggtaaatcgccggaattaggaatgtctgtgtataaatatgtatgtgtgtgcatgtgtgagtgtgtaatatcagcaaggctatggaaaccgtggagcattatgagtaactgtagacgataacagtgccaagccttgctttttaaagaggcaggtgcaaactgctgctttttgagaatagtaaaggagccatggctcataatggatacactgactggagcatggtgaagtgaatagagataaggtgtgttccacatgtggattactgaggaccgtggccactgatggattcttctggtgttaactgggtagagagagtcgttttatttttagtgtgtaaaaggaagagtgttaagcaacgtggattgtgaagcaaaaggcagatttttggccagatgcgtttgctctatgatgatcctgagatggctagacagcaaaagccttttggtttcatgctaagtgtattcctcctaaggagaaaagactgctgtgacaggagaaatatcatccccagcatgatatttctttggcttgcttagctcctctgcagttttcccagacattagtgtgatagctctttcaataataagaaaaacagctaaagatgttatggggtgggggctcttgggcacacaaagcagtctgtaggatttcttactgtggcatacattcccacaccctcgattttcatggaaatgatagcagcgagaaacagtgggaaaagatgcaaactattcagccccacccaatgccagcacttctttctttatggcctgactccttctggtaaactgttgcagcctcacagagcttccctgagcctcacctctgaaagagatgctctataaataaattctcctaaaatgcatttatttcctggagcaataatatgggcaggatattagatatgattgtaatgtaaatggctttcaacattagatggttttggattttgaataagcagattgcaaaaaataataagcatgaacaaatgaatatttttcattttgctaatgaagttgcattgtgtttcaaaattctagatgtctagtgtactaaatgttttataatctaaagattgtaaataatttgcaacctctgatatttaaaagatcactgtatcagcaaacaagggagtagtatatttgtatggtatcatgcaatttgatagaaataagcatgtgatgatttttaatcatagcgtagagatagtgatacaatctgataacaggcaaaaggataattcagggcaagcaggaacattggtagaatgtccttttccttttgtacctaagcattccagatctagaccttgagggcatttttatagagtgttagctaattgaacaacataaaaaaagaaaaagaaaatagaagagagagcgcgagcaagcaagagagagggaaaaagaaagaaaaaaaggaatttttgttttaattcacattatcatttcaaaatcccgtattttctctctaaagtccctgtggtgctttagaaacaatatactcaggactattaaaggggtggagaatgaatcttgagatttttgagctctgaatgatgatactaacttcacatgaccaaagccattttaaagtctttgaggaggtagagacaacgaaatcatcctatgtaataactatcatatctttaagctgaattttctcaaataaatttattttaggagtaagtctttttccaaacttgcatccaaaatgaaagagcaagttttgaatgtgtgtgtcagagcaccatgaatattgagtgttaaaaggagtttcacctaaaagaaattgcttttgaaaaaaatgctaattacataatagattaggggacgcacacacataaacacacacatacacatccctcagcttgcctagtcagtcagacataagtgggtctgaatctcagttctaccctttaattttgtgtgtttggagcacatcatttaatttctcatttaatgaatccagggattcatctgtaaaatgagaataattatatatagaatattttatgaggattagaaataatgtatatatgattatttgaacagtatttaaaacatatagtcaatggcaataactttcaggtgttattctcttaaatggaatttgtttattgcaataagccttttaagagaaaaatctgtttatacttttgagagaggcagaaatgacagaatccaatattggtgctttgcaaaggctagtagtcatttttcaaaatgtcaaaagttatatgctataattggaaacttttttatctcaaaaaatcattgagatttacataaatgtaccttaggtctttatattattgtttcacattattttgcacagcaagaaacttacattttcatatttaaacactagaccattaaatgtgccttgatgaggacattaatgataaagagataagtatccctaataagcataaaagctgagaaagcaaaaattggagtaaagtcaatgtcacatcacttcaattcggttgtttgtttttctactagaggtttacattgaatctgctgtgggattctacttaagcatccaggactacggaccaccaagctcactatggcctgggtgtggatctatcctactgaatcatattccttgaaatcatgcgtctatctctagtaaatacgtaacagatgggctgtaatttacttgtttattctgtaccttccaaaagtacctcttctgagggacagagctaaagggtcttttgccaccagacctacaatgtgagaaaacaagctcaaggaggaatttatttatgtcaaaattttactgagtgtgttgagaatagaaattctttgagctttacttaaggttgtctattttggcttcagtaagggagcttgtcggtgctctccactcagaaaccacaaggagtacactggtggttgaacatgatgggtttatgactcattgccgcgaggaggatacacatcatggggaaccgtgggggcatctcagtaaacgggtgccaggaagaatgcacaggatacgggcttcagttgagtaatttgaaagagggttcaagagactggtggctcactctggggatggggtactcccagaaagcaggaacaattctacgattgtgtatcccagtaagtcttatctacaggagaacaggctagagcgttactaaagctatagttgtaaggaggcagtaatctcatttggcaagagagggagatgtttggtattttgtgtcttggacaacgtctttgttttgtctgtgttcagacatgatatgggagtggtgttgttttggttttactctgtcatggtcagagtggccttgtctgatgctgatgctttgagaaattttttatgttcaataggagaacactgaggcctagctgatagtaccaggccccctcctgtgggtcagtggctgcctttctcattctccagcttgaacacaaagatacctttggagagagagagaaagacttgtttattattggatactctttagtacccaaagaaaataaattgtaggtagtaatgttgttaaagtagtcatgaaaaccttcatctgatacttccaacaaagttttcttagggccaagatatttcatactaacagatattgcccaaggtgcagatttgggattgatgttctagtggtggttcagtggcgaagaggaaatgggggctattctaattctcaactggaatccaggactaaaaagaagcattggtagctatgtgaaatgtatccgtgtaagacagctttgagcctactctaaatcccagacaactctataaagatttttatattttttgaggcagggtcttattctgtcacccaggctggagtacagtggtgtgatcatggctcactgcagcatcaacccacctggctcaagcgatcttcctgcctcagcctcccttgtagctgggactgcaggcatgtgccaccacagctggctatttttgtttttttaactttttgtagagacagtctccctaaggaacccaggctggtcttgaactcctggtctcaagcaattctctctcatcctctcaaaatgctggcattacaggcatgagactataaaacttattccactattccactattttgacagattagattaaaataatccaagaccatatttttgtgtgcagctccacacactttccaattttgtagcaataacatagcagtggatttatactaaaagaggctgtaggagattttggtaatttacataattggaaatgggaatgcccaagcatcaatcacaggtgacagccatctgaaaccactaggcttgtgagttcttctaaaacaagtacatgagtaaatggtttactaactgtttttcccatttagtggaataatgatatgaagataaaaataaaatatcagcaccattattttcaacagagtagtaggataaaatggctttataggataccttatatttattgaagatgctttgatctggatcactaagatattcataagcattgcaaaatattttgaaggtacacacacacacacacacatatttaatggctgtttaggccactgcctaaatagagagatgaaggaggaaagtgttgccagatgtgtggttaaaatgttgtaccatagaaatgtgaatgaggtacatattaaaaggtttatttttatagcagccaaagaaactatgccctttttagtgaaatcaggtagtagatccaacatttgggtgtccaaatagtattggagtcaattaattttgaatttaaagttgatgccttatctagttcactgatatctagacaggcttccatgtataatttattctgaataatatccctatttcttcagtctttcaaataacttaccatttgccctttataaaataccaacttataacccaaaatagcatgtgttgcctgaagacagtaattccccatcactgaaggtatttaaaatgaccatctgtcagggatgatggaaatttttattggaaagaaaaataccttataacctggtattctgtgattttctttcaatgtcttcctctctgtttctatttactcacttttatgatattaattttttcactgataatttcatgtcttagtaataactaatttatcctttttagagcagcatatttcaaagtgctgtctgctgacctcaactaccagaattacctgggttgtctgctaaaataattcacttcttaggacccacttcagacctgctgtgtatcagaacctttgaggatttttaacaggctcccaactctttcttatgcatactcaagtttagaaccattgtcttagccaggtgcagtggctcacacctgtaaccccagcactttgggaggctgaggcaggaggattgcttgaccccaggagtttgagaccagcctaggcaagatagcaagaccctgtatctaaaaaaataaataaaaataaaaaattagccaggcatggttgtacatgccagtagtcccagctactggggactgctggggacacccaacccccgagggtgaggtcatagtaagccatgatcttgccactgcactccagcctgcatgacacagtgagactgtctaaataaataaataaatgaataaatagatagataaataaataaatgaatggaaccattgccttagaatgtggtcaacagtcatgaagttgagttatcttagaaagaagaatctttaattttgattagatgtgttagtttattacttggctcttacagtaacatttgtttaagtctagatggcagcagcaatgacacaagaaaattgagaacaacatttcttttaatcttactcttatgtctggaatctagaactgctttcacatgctatcttatttgatcttcagaataactctcattgcatattattatcccagtttcatagatgagaaactggagactcagagactacatacagatggtgctgaagagaccatagacatttttcctactgttcaactaataacatattttgagccatttctcctgtggaaaccaggtgtaaggtagtcttctgtgtctcttgcaaagattctgtggttatcttctaagatatcctcctgattcttccttccagtgttgctgccattttgcgtcagttgatcacatttccaaaaatgctcactcttatctatgggaataacatggaaaagtaacttctttcatggctatctatgatactctcccaagcagcattcccaaaagaagggaaacttcttttgcttccattatgttttgtgctatgttgttgtagatgtatccatcagtccatgtagacaacatgttggactttgaaaattcacaaaaatgtaagaaacaaaacttaagtaaacagctgccttcatgtggcttaggcatgttaaattaagccaccataaaaagttcaccctactttcaccattttagctctaattattctcttgagaaaattttgttagtatgatattctcagtagttgttctattaaaagttcttttccatacactcttttctgaagtgttggaggtttctttttccttcttgataaagtttctaaagagacatttgattgcacattaaaatagacttgaaattttaatctgtatttgtttctgtcttgtcctgattcagagcatgctaaattataaatatgcttacagctttacttctgtcttgcttgtactctgttctaattcctgttggaggcagaaacaaaatcactgcctatttttatctcattggacactggtcggatacatcacaacaaataaagttaccatttcaatttccttttactagatagagcagagatgggattgctacccagggagacaatcttttgatagaaaaagtttaaatttttatgtactcgagaccaaataaatatgatagagtatttctttttctttgaaattcatgcctacatcccaacccgtagggagggtcatttttaaaaagctgcagggagaagggaaaatatgttctagataataatataccacagtctacagggtgagcatcttcttagtcatgagacctggtttttattcatgtttttctgttaactcacagacaactatcatcttcttccacacactaatttgtgtttgtagtcattaagacaaagaccttgatttctagcatttgcttaatgaaattcagtttctaagaatcagcttgttttgctcagtttaatttaggtgtttcttccgaacacatgggaaagttcccccaattcaacaattggtattggtttgctgagtgtatagcactgtgttaggtgctatggcatggctaggctaaaagccaatgattgacacttacatggaattcataatctgagcagacatttctatctaagaaaaaagtaatgagcaatctacagaaatattataggtatactcacacatattataagtaaaatataaatatgttgtgcaattgccaaaaagaaactctacaggattctgtagaagggcaagagatcagtgtaattttgttagaagagtaaaccctatgagtgggtgaacagtagtacagagccgtaagttatggctaatgtgtgagtataaaggaaggggatacacaggcattctggatgcaacagcctcaggcatataattccaaattacagtaaagattaggaaactgttgagtgatttgttgcagtgcagagccataaccattgtgagtggactctgacatggttgtccttgtgctttcagccttagccagctgcagcttgcattttggaatccatcttgttttgatgactgagcctgtgtccttctcctattatatatatatatgtttaatcactcattttacctgtgaaaatttgccccatatctctgtttatagattatttctgcaatcagtagtaaattccaataagtaagcctccaaattaacaagacattcgaatctagtagggacaatttttgaaagtatctaaatattcagccttctgcctttacctgaaagagatgctggtatggataacccaggattgcaattatctataacacttatacaggcactcataatactttgcatagcagctaaaaactggtttgtccctttgggtttttattttattggtgatcataatgttatgctagtataacattactaaggtagtccactttgcaggctgactttgagtttgctctggatcttctgttggattttcagatccttgaacaagaaatttgagactttcccctcctttccatttcctggtctggccacaggtttctgtgcagtcttctttgtccattttaactggcaaacagagtgactcatgaccaaccatttcacttctggccacctttcacatcctacttacaaaataagcacaattatagccagtgccacttcaaagaacacacatagttaaaggaataaaggggtgtttttgaaataaaactatagaaacagagctaagtgttagggtctgtgtcgatactaaaaatgggaagaaattaaaaagaaattgtgaaccattctagaatgtttcacccagtgctagtaagtggtacctttttataagtattttaatgtaataatataatggttactgtaattctaatatttgacaacattcttaataataagtatttctatgtggccaattgagcccagtttaggtgggaggtattctagtttaaaaaaaatgaaaacttaaattcaaaacattaggagaactatatatgagaaatttagtattttctatgtcaagattttggtcctctttttgtataatgcttatccctaaagaatccctttttcagatgttctaaatgcttgcccagaattcagagggtatggtggcgggatgcctttctctcttactccatagcactgtcttgtaataagtgcagaggggtggcaatacacccaatggccaataatttaaaatgaaaatcaggaaggaaagaaattagaataagtatagatactttccattattttagtagtttagagatgccattagaactgctagagatattcatactgctattaaattaatgtgaatgtctgtcttagtacttttgggctgatataacaaagtaccttagagtgagtagtttaaaaacaacagaaatttatttctcacagttctggaggctaggaaattgaagatcaagccatcagctgatttggtgtctgatgaaggccccatttcctggttcacagatgatgccttctctctgtgccttcacatggtggaaaaggcaagacagccttctggggcgtcttttatatgggcactaattccattcatgaagactctgccctcattgccaaatcaccttccaaaggcctcagctcctaaagccattgcattggtgattagatttcgacttagggatcttgaggaagacacaaacattcagattacagcagtctgctttaatgttctcccattcagttaaacttgtattagattgtgtatagcctggcatgcttaaatagtattttctgtaaagttgacacagtaaatactttcagtgttctgtgaagtcagtcaaattcagaagactagccctacatatgaatttgatctatgtatatgttgttgccatgaactatagtacatatgtttaataattgtctacgtgatttattcttggcttgatctaccacatattatcatttgtgtagaaaaggtgttcaaaagagactgtataaatagcctataaacatcagttctgttcaatgtgaagaggaaagagttatcataatggttcatacggcattcttataggtcattcctctgtcccaataaagtacagagactgtactttgagaattcagaaattggcaacactttccacacagtctatgattcatagtagggactatgaagagccttaatgtgaattagccatttgtttccataattttagattattctgaaaagagcatttaaatagcattgataaaatgttcatgagtaacacattactatactccaagactcagaataagttcatatactgaggtttggggatgagtggtgactggattttggtttgaatgcttagctatttagggcatagtgctaatctagccaccaatatcccataagagccagttatcttcatttagtgtcaaaggcatacacttcattcttaactgaagagagtagctgatcaaactgacacagcaaagcagagtactgccagatgtgtgcacacccaactacgttaccaaaattaacacactgcgattatcccagagtcacttatctcctaatgtgtgaaggaattctggtcctttttagaaggtcatatgaggggaaatgatactaatagaatgacagtcaaataggggtcttctgtggcattgtgatgaagtctacctcaatcaaacccgtttgaacacatgatgttttgttaaataaatggaacaatttatttatagaaaaattatttattagaaaaaatagttcatcccattggaattgcatttttcaatgataataataaatagtagttaatattcattgagagattagtatatctacatgccagtctacatagagttctacatagattatctaattttatcttcacaataacgtgatgagtagatagtttatgattccatattaaagatgacactgatgtccagatgggtttaaaaaaacccttcctgcttgaatctacatagctcctaaacgagctatcccaggtcaaactgaccactctgcttatctccaaacccctgtgctatgtgaatacaacaatcttttacacaattcaaataggattaagaattaaagaaataggagttttgtttatgtcccaaacctgtttcactcatatgccttcgctgattggtcaattggtcaatgaatctaaaaagcttttttttttttttttttttttcccaaatacggtttaaaacagaagtataaatccaaattagaaaagtttttttatgtagttgttgactaagattattagatgctttcagaatattcaagccagatgtgaattctcagactcagctgtggaacactgaagaatgaagctttatagttggtatttccatctgcacttcaactgtatttgtcaaatggctgacacccttagcatagcctctctaatataagggggaatttgttagtgagttcatgttgcttgtcctaattcaaaaggtcactaatctatcatgtgctccataatctcattacacagcagggacctctttccagttgttaaagaaccagtaggactgattggcctattacatggggcagtcaggcatttgtttactggcccatctagaaactggtgctttaaactgtttttttggatgggtaggaggtctgttccatctggaaccttggtacctcttccagatgaccctgccccaagtggcttccatgtttgatttgtgaaggtagttcttgagcactagcaacaggttaggtgtggttggggaacttacacttactgtaacaaaacgccttgatcagataaaaaattactgttggaataattttctgaatcactgaccctcatccagtgggagactaaagctcctcccctgattgctttttcccagtaataatttaaatggatgactatttttggtaacctttatttatagtttgtcaaaatgagcagaatattagctaaaggaagtatgttttcctttgtggagcaattaatttttcgtttcaaaaaggctgtcaggagataatttttgtaggttgcttatataacaacatcaataatttaaaaaaattacatacacacgtacacacgcacttacattattctgagttttagatatgaggctcttggaaatggcttataaactttggggattttttaaaaaagataaactgccataaccatactccaatttatatttgcctggatatttgaagtatcttcaataatactgctgttgtttaatgcgcacaaaaaaataattaaaaagaatgaataggatgtagtattagctagtaaaacagaatgactatagtaaaaaataatgtaattgtacatttaaaaataactgaaagagtataattggattgtttgtagcacaaaggataaatgcttgaagtgatagataccctgtttaccctgatgtgattattatgcattgcatgcctgtatcaaaatatcttatgtaacccataaacatatacacttattatgtacccacacaaattaaaaattaaaaaaattttgaaaagcaactaaaaaaaaattgctgttgccatagaaagttttttattatacactgtcttcattctaaaaacctaaggccatgccctgtacagggtttggattcttgtctaaagcagaattattaatttagaagccataaattaaatttccaaacattcaaacaggcttctttctccccagggtagatttttaactctctatgtcaggatctattggcagttttttgttccaactcaggtgtcaagggtcatgtggagaccatcatgatatggcctaatctataatttaagtatcatgtacatttcagtttaatattttaaaatgaaagtaataataatgtgcattttagaatttttactgcttgaattggtgtctcaagtttatttcaaggtgaccaatgaacaatgattttggatctcattaaattcttaaattttctggctgtatagctctttgtatatttctgtatgactacatatcactcttttatagtatattcatataagattttctgcacttttttgtaccatccagaagagccatattgtaggtagaggttattatatactttatgaattgcagaagtaaacagttttgaataattcaatacactaagaatatatggttccacatggacctcctagaacatttttgacaccaataattacatcacaggagtgattaatacttacgcagatatggctggctaggtctttcagtatactgaatgtttactgtatgtgagaatgatcccttgcaccttttcaagcacagctgtctagtaaacatttattgactatttgtccaataggctatgtagctctgatatttgataataggattaatattttgccttttctgtctacattactgtactaatttgattattttccctgggcctatcatgatgacaaggaattatgtctgttgaccttaaaatgaccttgaggaaatgaggtgctaatatcaatttaggtgacagatgataagtgcctgtgttatagctgactgaaaattcatgttccacagcgtaatatctatttggaatctaaaattctaaagttgaatatgacatttagtaaaaagatatccagtagaatatatattcatatctctgtgtgtgtatgagtgtgtgtatttgagccaaatattctctttgggtgttgctaaataatggaaaaagttaccaccaaatttgttatgtgttttaaatgatagcatttggttatcatttattaagggctctcaaatcatacctgcagccaacattgtggataagagaatacttggtaacaatcattattaaaataagaaattcttggaaaggtggatttcagcattgctttctcagaaaacatatggtacttgaatttgccttcttctctgtgtctagtcaaggtttgcatttctttaatgatgtgcatttgcccttttccactataaaaagaattgctttttgccacaatcagaaaacatttagtatattttatgtggacactttctcagttggtagaagacggaagaccaaataagcttataaatagtaatacacatgcatgataatagtaacagattattttagtctgctggcagttataggtaggtatttttatacttaatttgaaaaatacttgagaattaacagcaaatgtaaaattcaaagagctgaattatgaaaaatgatattttatctcatacaaatacatttttaaattctaagataatgaaactgaactcttagtgtgagtttagaagtgaggctgaaaacagatctcaggactatttttagtagactttgtttaaattcttgctaatgtccaactaaatacatttgaagttatttagattgcaataaaaaaaaccaccttcctgcttctttatttcatttgatgtctcaaatcccacattatttatggaaagctgattttaaaataatgttttatttttgagttgacgtaaaacatcaaactgaaatttgatttttccataaacataaaaagacatttttttgttgttgttgtgtttgctttttaacagatatgtataaatgactctcctcccagtggaagtcatttttggaaattttagtgatacagtccagtttaattgctgaattgtttacaggtgttaaagatttctagcattgatagtagagaaatttttcctcattaatttttctttttaggaatttgaagccctttagaatataacataaatacattttgcttcaagtttaatagcagaaaaagatcccttccacctacctcatcatctctgtgtacactaagctctcccaagagcactctgtgtgacttaccgtgatgacaggtttttgtgtctgttttaatcgtatttaccatacgcaggtgccaattgttctgtgagcatacacataacagcaggtggtgccagtcaggattcagccaggattaaggaggaggggctctgcattccacagtgcacatagccaccttttgttttcccatgacagaaatccccttccctccccacctgccagccctgcttatccacctcactctaggagctcaatttgtggtggtgtgctttgtgaaaaagtaccaaccacccttacgtcaagaaagtccaaacgattgtgcaaagtatggcccgtgttgttctttgggaagtcaattttaacttttaagatcgttgtcatgaaatgacagttaattttcttgttagaaagttctgtagaacttctaacaaaaatgttagaaagttctgtagaacttctaacaaaaatgttagaaagttctgtagaacttctaacaaaaatgttagaaagttctgtagaacttctaacaaaaatgttagaaagttctgtagaacttctaacaaaaatgttagaaagttctgtagaacttctaacaaaaatgttagaaagttctgtagaacttctaacaaaaatgttagaaagttctgtagaacttctaacaaaaatgttagaaagttctgtagaacttctaacaaaaatgttagaaagttctgtagaacttctaacaaaaatgttagaaagttctgtagaacttctaacaaaaatgttagaaagttctgtagaacttctaacaaaaatgttagaaagttctgtagaacttctaacaaaaatgttagaaagttctgtagaacttctaacaaaaatgttagaaagttctgtagaacttctaacaaaaatgttagaaagttctgtagaacttctaacaaaaatgttagagttgaaatttaaacaaatacagcacctctcaaattctacaggaacatatagatatcacctatatgtgtataataaatataatatttttgttattgcaaaatcagtatatatgtgagtgctctcttttgtgtgtgtatgcatgcaagtgactttaatgtgtgattcatactaatttcattttttagagcataaacttttagagctgaaagcttgaaatttccagttctaactgtcttattccatataaggaaatggagacccaaagaagtcaagcaccttggccagaatcatgtacgtagttagtggcagacacgggcctagaactcatgttacttgattcctagaaaagtgtttttcctgtttcttacaggtcatctgaaagagcaatcaaaactagcaatgggagagagaatttcagtgttgattttgggagaggtatagctttagcaaagcccctgatctactgcatgaaggagacttgtgattaacttggcagtgagcacaagccatgtttctaacatcaagtggggtactgagcttctatctacaacgttattacacaaaagctaatttcccaatatttactaatcaattgcttcatgagaacttgtcgtaccggtgctcccaaactaggtctgttgttcagctgtgatttgtggatggggcactattttactatagtcactactctggtgtccccaggaaattagatggcttcacctggttcaggtatatattttataatactttaagaccatctttaattagaactaaaacaaaaaaagtagttgaaataaaaatattatgaggaaacaatatttgggtttgttgaaccattaacacatatgtcctctaaaggtgtttggtttaacagtgtgtgtagttttattttttagtctctttctaccttgattcaagtaccctcccctcctccccccagccccacaaaacacacaggcgtgcacgtgagcgtgctcttaggcctcttacagtttttgcaagccgaccacaggggctggactcattctgtaagtgtttgaagttcaattactatggtactcttattacgaagggttactggtggggtgccttttattcatctatgtatttatttattcttcacttagcacatttattgaatgccttttaatgaccagacaccgtgccaaatacaagatacaaaaatgacagagacatattccttggtctcaagaagttcacggttcataaaggcaaacaaatacataaatagatgattactatgtgagatgataactgtgatatggaaacatacatagcctatcacaggagcacagaaaaggctaggcaagagctcctgcaagctatgatgactgagctgagctttaaagaataaataggagtgagccaggcacaggtgtgactgacagtacttctgggagaaagtggagtctgagccatctcatgaggtggtgaaagcagccctgcacatccagtgaagaagggcaaactgagtagagcgtggactctggaacgggaccacctgctctgctgcatgcaaggtgtgtatgcatgtaactttgggcaagtaactgagcttctctgtgtctcagctgcctcatctgtaaacactgagataattacaggaccacctaatagggtttctgtgacaattgtgagctagcatacataaagtgcttagaatagggcttggcgatagtaagcattatgtgagtgttttgttgctagtttgtgaagtgaaaaacaagcaggacaggtgagaaatgaggctggaggcattggcaggtgtaagatgactgtatctcatgtttatgagcttggactttatgctatgtagccagaggggactttgaaaggcttaaaaaagtgggaaaacatggcgagatgtttttttgtcactctggagactgcagcgaatgggaaaatctggagacagattttacccagggagctgtagtgctagggagacatgatatggaaatgaactaagatgtagcagtatgtgtaggaagaatagggaaattagtctgctcaggccactgaggggacatgggagtgaaatggagggggcggaggggaaacaagagtccaagatggccccttggtgtgtagtgctggtgatttggtggctggtggtactagcaactgacctagctaatggtaaaggaggagcaggtacagaggggaagatactgggtccagattttcacatgtaggtcctaaagtttctgatggaaaagtccagcaagcatttgaagtgtaacacttgggaggaaggtcaggacagatagagttttaggaaccatcagcatggtgaggttgaaatcacgagtaataaaatccctcataggtggaggacagagtcttggaatgacatctacagttacagcgaaagctaagaagaggtcttcaggttggaggcaaagaaggtagaagagctcctgggaggactggaaaaagaacatgctcatgtttttgcccccagagatgatttcctcacacatgtgtgccaatattagattttaagaagtattcttcttaggttgcactttacatatgtggccccaagcatgagtctaaagttgctagtgttccaaaacttcaggcaggccacatggccaaggtgaaaataactagtcacatgtttctctctggttaggtggagcaagcttactcttgctaatactgatcacacagtcactatgttcccggagccactcagtaatgctggcatttttcctaaggatgctcttaaaagtctatttatctagttcctgggatcatttggatagccattcccaaagaaagccaaaacatagcatctctctctatggcatttttatttctttctcattagtttccccctgagtgttggaaagatgtaggttgatagccacatctttgcaacaatcactattgccttgatgagcacataagtttttcctgcccttatgagtgaatttcttctacacaatgaaacaattgtggagatacacaaaaatggaaacaattagttttgtctaaacttgctgtgctgcatataagtgatgatataaattatgaagatagtgactttgttaagtttaaatgatttggatactggaagtccttggaggatctttaagcgtatgttacccttgtttgcttgtaccattgaatatgttgtgaatgtcatacaaactcacatcccatacaaactttggaaaatttcaactttaaaacatataatgaaaagcaaataaaaatacctaacaccatttgaatacttgattagaaaattgtacagcgaagcacttaaatgtaatttttagattacagatgtaaagttgatatcacataaggataaagagaatgattagaaatgactcacatgattgtatgtttgcattacagagagaaatgacatggctaagagtcaaaaactgtagacaataaagataataaactgccactttaggtttagggaaacaaaaaaggtatgaagtcaaataagagatgttagacggaacagattaaggaagttagagctgggcatggtggctcatgcctataatctcagcactttgggaggctgaggcaagaggatcgcttgagcccaggagtttgagacaagcctgggcaacatagtgagaccctcatctgtacaaaaagttttcaaaattagctaggcgtggtggtgcatgcctatagtcccagctacttgggaagctgaagtgggaggattgcttgagcctgggaggttgaggctgcagtgagccatgatagggctactgcactgggcaacacagcgagaccctgtctaatgaaaagaaaagaaaagaagagaaaagaaaagaaaagagaggagaggagagaattagaaatgaggatcaaagtcctggaagtaaaaggtgaggtaagcacagaagagattctgtagaacaaggagagagctgctgggcaggtaatcagtgaggagaggagaacgcacaaggtcagagagaaatgaagagaagaacatttatgccctaattagtgagcaatttgttataaaacagctttgccacctggagagtagaatttaaaaatttattggcacgaactaccaaatcagccaaattagagcaggccatcttccaggtctccagcacaggctacagtggacagtgtgcaatagcaacccttgtcatgaaggcggagagaagaggaagtgtacttcaggaaagcacgggctaatccaatcaacgaagatcagcataaggtcataagagttccatgttgcaatcagtcttttaaaagccaaaattaccttttgcctttggcactgctatctgataccttaaatggagtattttgctaccaaatgaaactaaataggacaagaaagagctgctcatctctttattgcaccatcattgatactaaacttttccacaaaagggtaatgtttctctttaacctcaggggcacatgtgagtcattgctctttcagatcctaactatccagtgatatctattaagtcaccacttgtacctttaacacagtttctattcagtcctcctggcctcccgcaaggactgcattagtctagtcaaccagtagtgctgctgccgaagttacctattcttcatgcttgactctaagaacctcttcctttctttcttcttgttttctaggcatagggatttccagctttacaacatgctatgaattatcctcctctgtgttaacacttgtgttaacctcatccgaagtcctgggggatgtcctgttcaacctgccatttcacccatagtagagttggtccacagtgaaaagtggtgaaaagactgaagtctttataccacttgcatatattgttcctgatcctgcgtgtacatttcagagaactggtgaataaactctccgctccatgcctttctgctcagagaggttacatcttatattctccaaatttaaattaaaatgtagcttccttcatttgcttctcttgtttcttggtatattttcccttcttctagacaaagttgatcagctttttatttttttattttttgtactctactgagatctattcctagaatgccagcattgtccacctttatcattaaaaaaaagtctgcatcatgaaactatgagtcctaattagaagggtagtggtgattttctaaccaaaaattacttggcataatttactctgggattaataagtataaatgcattgtcccatctttgaaatttttcttttacttctgactagacatggcaactctgagtttgaatccaaacacaaatgtacttacttgaatttcctggttttggtccatcataaaagcaataagtttgacaggaagacagcctatcagtttgccctacaagtcttatcagtataactttggaaccaaccaatccaacactctttattttgttgggtagcaactactcctgcttgttcacccgacattacattttcttccagcaaagatccatcaaccttattcccttgtgtgacttccctgatttcactcgtggctgccattaaatgcactgtgtcttttgaaaacacttaaacactaattaaattaatttatggtatatgtcattagtatcccattttgccttggtcttttctgcccaaaacaataagcccccgagacattcaaaatgcttgtgtttagttgcttagtaaatccttagtatccatcataacatcaaatcttgatgacagtaatggtgatggataaaggagaaaattacaccccagagaagttatgagtcaagaatgtctagttagatttacttagaacaaagtaacagacaagataaagccctaagaataagtctgggttcattttaaattgagatgacaaccatcccatagtcctaaaataattactgcttctaatatagactgcacatgatttaattacttcacattgattttaaaacaaaacctacatgcaatagttgctgacagaagtttagacccgatgccttttcagccaggataggtacaagcactggcgcgtgtgacagcaggcttcaaacctcattcagcagacgggatagtaggctagataataaacagcaattagaactcactgtgataaaggccatggtaatattgttagagagtgctacagaaatgcacagtagtagttctctactcagaccaagagatcaggcagggcttcataaacatctccatgtaatttgccttacccgggctgttgcctaccctggctgcctagataatgcttgcttctcttccgagactcaactcaaatccaccttctccttaatccagatttattctttccttgatcagctaacatgcgcagtgttctgtcccctgcacactaccctcaaccccaggaggattcattgcttccttttagttgctataagggctttacaatctggccaggcttagtggtacaccctgctcctttcccattttgaataaaatctgcaccatagggccagagaaatcagagagaagagcaattaccttgagtaggtatattagttcattctcatgctgctaataaagacatacccgagactggctaatttataaaagaaagaggtttaattaactcacagttcccagtagctaggaaggcctcaggaaacttataatcatggcgaaaagggaagcaaacacatccttcttcacatggcagcaggagagagaagaatgagtgccctgtgaaagggggatgccccttataaagccatcagatctcatgagaactaactcactatcaggagaacaggatgggggaaactgctcccttgattcaattatctccatctggtccctcccacgacacatggggattatgggaactacaattcaagatgagatttggatggggagacagccaaaccatatcagtaggcatctaaaaactcagccctccactgtctgtgtttctctccccagcacttttgccattaccctatagatataatgatggagctctggcttcatgataacttcagggttacctggtatggaaaagagagacaataaaacttggtttttgtaacaatttttatgtcctcaagccagatcccctttccaggacatctccagcatgtagggatgattcagagacccagacataaggagtcacttaagcaaaccagagaagcatatacagttggaatttggggtggtgggtagagaggggcaatgttttttgaatgctacaaagttcaaatgccaatctgttctcttcctgccggactggtctttgtgatgttcaaataaagtgagcatgagatattctcaaagttagaaggagtctgtaactatttgcttacaggcagaggtttgggtaggggacagggtgtgagagcacctcagttaaattgtgtacggaggttctgaattgtttaggcaatagcaatgcattatgcaatactcagccaaaatgtgagtgtaataaattaatagaacttttggatgactttttcccttaaaatagacacttggcataatttttttttttttttttttttttgctgtcttgtctctccagcaagtgtttaatctttatgtgtttagattgtttattgggtgctataattatagatatttgaatattagagtgtccctactcaaactgttttcatcacaaaatgtatgacaattatattgtgccattagtagacctgcttttcttctcgactctgtcacaaggacagtgtcttttttttttttttttttttttttttgaggggaggtcttgctccatctctcaggctggagtacagtggtgcaatctcagctcactgcaacctccgcctcccacgttcaagtgattctcctgcctcagcttcccaagtagctgggattacaggcgcccaccaccatgcctggctagtttttgtatttttggtagagatggggtttcaccatgttggccaggctggtctcctgacctaaggtgatccacctgtctcggcctcccaaagtgctggaattacagtagtgagccaccgtgtctggctgagggacagtgtcttttgattcttggagttttgcacaacacctggcacataaatattcctcagctaatttatttaaaaaataataactagaggagctctgattcttgactggacacatgcaatttagacttctactaaataaaaaaagaacactagaatagagaatagatgcactgggattgtgcagccaggagaaatcaatctacctagattgcctatgtgattcaggtggaactaggatgccagcctgaagcgtagaaagaattcccaagtattctacagaagactacaggccagaggtagaacaaagcaagaagaatggcattttttctctacagtcagcttttaaaacagcatacggtcttgtttccatggcaagaaaatctcctaggtgcattgccaggagattctcccttagaaattaaaaagaagaaagaaaagaagggaaagaagccacccatagctgtgttttctgaaaacagcttgactctcctgctgatcatcgacggctgccacgccacggaaacacctcatccaatggtgcccaggccgcctctacgcagcatgctggaagcttgtgattaattttgtttgacagcagcaaaaagtatgccctacgttggatgccagctgattatttccagtatgtttgctgctgaaaattccattaatgatttttaatatccattcaacttgaagagaggagaaaagtgcttttctgaaaaaggaaaagtaaattggactcagtcttatggaaaatccaaatctacagagtgaacgtttgatggcagatgagttgaggaaaatgtgagcaatttcaaaatttttttacgtgaaggatttgctctattattggtaatatatctgtagagaatgtgttgtgaataataacatattttgattgatgtgctttcattttcttcccagtgtacaaatatggcaacttttaatgttcaacttgatgtgtatttattaattgcttactgtgttcaagacccttattaaatattgattgaactgaaatgagccctgggggaacctaccatctaagacagcaattctcaactgtggctccacatttgaattcccaggggaacttgaaaaattctgggccctcagaaattctgacttaattgttctggagtaaggtctgtggcctcagtattttttcatatgtctcctcatgtgcataatatgtaattagatttgagaatcaacagctgatataaaaggaagtgaaaaggcagtacatggccaagtccctgtagatatgcaaaggacactgttttaaaatcatttatctatttgaaaagtatgatgatttaaaaggagaggaaattacatttttttgaggctgccagaaaaaaactccatgaaggaagtaatatttaagtagactctcaatgtgtaaaattttgatcggcagagataggtatccaggtagaggatcaaagactaggatgagaaaagaataaggccagttctgtgaatacccagtgactaacacaaggctaggagaaaaggagtattgattgctattataaagcattaccattaatatgtaatttcagctagctatgaactcaaatacgtttatgaagtaatgagatattttagcatttttttctcatgtgctactcctaaaagttactcttaaaacaacagggttgacaaatatgtttaatatatggcaaaatagacatagatttaaaaatgcactttagtatcttgctatttgattgtgtggtcctcagatgagcagcattggcatcacctgtaacttgttagaaatgaagctaatgcaggatgttggcccccaccccaaacctaacaaatcaaagtctgcattttaataagatctttgtgtacacactaaagtctgagaagcactactttagcatctcaattattattacattattagcagtaattaattgagaagagtagagaagtacgtttcaacaaattaaatttctacctatgactgtgaacgatgaatagtgttgatatgcaataatcttttctttcaatcatatctttttatatatgtcaccctatatatccccatatagtaatgtacttatgtgtgattaatacatctaaatatgtttctttgtataggtgttctctccagttccagtctttatgtctaaaaagataacatcttttcattttagaccttggtaatgttttctgtgcttttcaaaaagatgtcctcaacatcacctctgaaaatgcattatgatctcctgtgcctctgccatctcattgcacactggtttcggtggcatgtggcagatggaacagaaagacatgaggctgggaaactcatagattccagaggaaacttgaggcacacaggaagctggttcagcttgggcatgcaagcattatttacctctttaatctgaattaaacaagtaacagtaagtaatgattcagagaagttttgttaagtggcagaatattttatggatgggtattttcttacagtgcttctgacctaagaaacggcagcctatcaacaaataattattaaaacattccttttcccaaatcgtattggatttggttacctgcttaaacacccttaggctgatggttagcaacaagatcttagtatactttagttacaaaatcatctgctgttctcaaactttagtgtgcgatagaatatcagtggatgttgctcaaaatagatactccagatcccactgagaatctgattcagtaatttgggggtaaggtccaggactcttttgaaacaagcattccaggagattttgttgttgttactaagaatactacattttgagaaaacaaaaacaaaaaacacattgctttaagacaggggtatccaatcttttggcttcactgggccgcattagaagaataaatgtcttgggctacacataaaatatagtaacacgaacgatagttgatgagcttaaaagtactgcaaaaaaatctcataatgttttaagacagtttacaaaattgtgttgggctgcattcaaatccatccttggccgcatgtggcctgcgggccaagggttggacaaacttgctaaggcattgtattcttaggaatttactattttctttcggtatcagtattatctaaactaaagctacgcaccaggctaatacctaagcttagtaaaccatagattgatccaccaacctttttgaaggagatgatattagaaaatgattttgtatccattgtaggatttcatattctaagcattgacatatgtaatctattgggccaggcacagtgtaatgccagcactttgtgaggctgaggtgagaggattacttgagcccgggagttcaagaccagcctgggaagcataacgaaaccctgtctctgtaaaaaatacaaaaattagccaagcctggtggtgcatacctgtggtcctagctactcaggcagctgaggcgggaggatcacttgagtctgggaggttgaggctgcagtaaaccgtgatagtaccactgtactccagccagggcaacagagtaagaccctgtctcaaaaaaagaaaaaaaaaaaactgaaaaaataagacagctgtattatacaatgcattagatttgattagtgaccatgttgcattttttgtaagaaaaaattcactaactgtacagtttttacaagaaacctataatagaatctgactttactggttggtgctggatgttttcttagctacttaccattaaagaaaggaaaaagaaggaaggaaggaaagaaggaaggaaggaaggaaggaagggaagaaggaacatgaataacaacttatgtaaatagatgatcattgcaactttatttatcaatagcaaaataaacctaactctcaaaccataggaacatggataaacatattttggcatacccataggagagaaaaatgcagtcatttaaattaatatttttcaaaatattgaatataagaagattctcatcatatcatgttaagagaagaaataagatttaaaaagttaattttaataatgataaaaacatacacatgaaaaattgagtggaaaaacaacacaatgtaaattggtcatatcttgaatattaaattgtaggtggttttaatttttttctttctaactttctgtatagtccaaaatattttcaataagtttatgtgacttttataattaggtaaaaaaaaattttaagaagtataatttttaaaatctgggttgttttaagagtggttcagcttaagaacaggtggatggactaaatgaacctttttaacattgcttcagttctaaagaccatctgcccagtcctattaaccagtaactacagaaagaagttagatccaattagtaaaggcagaaagaaacattgcctttgtgagttctgtttccctgtgcatatctgccaccttaaactaatggagctatttattgagttcaagctgtccccaacgaaagctgctttttactttgcttctgtgcaaatcttgttcactttttacaactggctacagaatcaaagccagcagctggcctccatgctactacacagaacaatagcctgagcccaagcttctgaagagcaggcctgccccagtatcttgaatgtatgcctgcataaaaagcagacaccacccaggatggctgtatctgctgcttctgctcaggcagtaaatatgtaaaataggaagccaaaacacatccagggccacatctcattgagtgcccttggggggaaactcaattggacatcagtttatctttaaaataggaatcataatggcttcctctgattatgtcctgtaaagtatataagtggtttataaactacagttttaacatactggttgttaggtgatcgtgttcccattttttatgtggttgctttctcaagcacatacataatcatgctaaagaacggtaaaatagcagcagtcctcctgccatgcccaggacttatgctactttgtaatgtgatctcaaaatggactgtaaatggatggcccagtggtatttattatcaccacttaaagtgaacccatatgccagtggcatattgagctaacaatctgtgatgtcattggcagaagcagctcttccagaaggcagagttgctgaggattctctatgacattactctatcagcatattggatgttgctcgtcaatagtagccgtggtgtcggggaaataaggtcaagtgaagcagtgagttactggtaacttaggggttaccacctgtcaaaaatcatacagattatgatttttttccaaaattaacctgaaatctcataggattatcaccatttatatgttttgattcttctcatcagtcctgtgaggtactgttattattgccattttaaagatgaggagactgaggttaggaaagattaaggaaggtgctcaagttcactcatttgggtggtgaacccaaatttgaaacctcccaggtaggctgaatgcagagcctctgctgctcaccactttataacgtttacctgtaaatattctgaacaaagtttaaaaaaggagcacttaatcacttaggaaaaccaactgccagagagtattttaggtttagccattcacataaaaataatgcaaactagtagagttactttcttcttaaactcatattttaatatacaaataagatttctaaatcccaaagagagaatcttggaagatagttgcaaatatgaaaagttgaaggctatttcattaaacccatttacgtttttttaaaaaaggaaacttgaaacccagagacgttgacttgctcccaaaattcttagaataaacacgtggaaactgcacaagaccttaagggtcctacctcctacctcatggttcagtgcccttcatgtgaccttgtccatatatttaagtagaattatgagattaaagtttgtaccttttcagtatagttgaccgactcttcttggaatctattgagttagtgttttattatgctctttgttagcctcgattgtttcccggatacaatcatggcttgattttgtcactgctcccttaaacttgagattctaacctacatgaactgggagcaattttcagtgttgttttgtgctttttgcttctggccatgtactgtgaggctgtgtttgaggttgtccccgtaggtactcattcagatagaattgcctgtgaattgttccttaaacttttaatttcagcatctttaaattgcacttacttgttttcatgtttggttttcttttctagattttaagttatctgtggtcagggaacatgacttatgtgctttagttttcttactgctcgtcacactatgtggcacattgcaataaatgttttttaagtaaataaacttggaaataattataattgatttcttcttttttaaacttcttcgttgatacctgcctttcttctcatttatctgaatcaatgtgtcattatggacagtgatcttgttggaggaaattaaacatttcaattgcacgtgggctctcttcttactatactttttcctcagcatgccacaattacccaaattcaataaagcaaaaataatgatacctaattaaagatgaaaacataaagtcgtttatctattaatttaaataaagtgaacctgttatcaccctgagaatttttttttttttttttttgagatggagtcttgctctgttgcccaggctggagtgtggtggtgcgatctcagctcactgcagcctctgcctcccgggtttaagggattcttctgcctcagttacccgaatagttgggactagaggcacctgacaccacacatggctaatttttgtatttttggtagagacggggtttcgccatgttgactgggctagtctcgaattcctgacctaatgtgttccgcctgcctcggcctgtcacagtgctgggattacagacgtcagtcgccatgccctgcccaccctgactttcttaatgccttgattctggaggatgcagttcttagtaaccaggctgtggccctctgatgtaactttagagaatgattaacatgtcacgtggttagctgggctctgagatgatctctgtaacaaagcagtctacattgttctcccaaggaagagatttgtgtgtgacttattgaaggggaattggttttgtttcttagaacggtttatcatttcacaacctgtattttccattgttattctttatcactagaaggttttaaaactcagaaataataaaagagaatataaaaactctggaagcctcttaaattgattgatgggaaaatagtttagtttgttaagtacattgtctggtagaccttctttccatactaggaaatggaatggaatatatacattccattcgagaatatatattaaatataatgtttgaatatatattcaaagaagtttgttgcattcattcctggcatggcctccttactagtttttctaactctgccatgtcacctgttgtttcgtggatgagcaacctattgagtttgttctctatacctttgtccctgtagaactgtgtttggaatcaggcttgttaggacagaaaatcaatcggagttgtgaaagaaagtgaaaccctggatgcattggagaggacatagcagaatggagaggaagaggatgggcataggaaagagacacaggaaagcccattagggacagtatagtaacctccatgttaatctactagtcacaagtgcattgagactacaaacaaaattgtaagaggatattttaatctataaaataaatgaaaaattattttcaagctcttcaaaggcattacttacaaaatatgtattattcttatcagactccagaaatcgatcattttgtatattttaaagaatttggtttcttgaaaaaatgtaatagagagttttcactaactcagtctatcttttcttttaattagttctgttaataagattttactgcataggtagtaccacttaccaccttacatttttaaactcagtattaattgtgcatagggaagcttcttgcacattgatggtctttaattttgaaaggagtacctctaaatcatcattaatttattctaagagcttgacttcattccagtctaactgtctttgatgcccagcaagaatggctgggcattttcttccaattaatacagctggcttctgtttaaatgaattaatcacgaattcaactgtcttgattctcgtagtatgacattaggaaccatttagtaataaagtaagaagcttaatacttaatggaaagaaagatctgtttttttaatgcaaaaattttattatcattccagttcctggggaaaattttgctgccatggcaagtattcttagcagactcttgccttgttctcctactttggaatcagggtgtttagatgatataccatagacagggacttgaaatgtaaagattgaatttacaaagctattttttttagctttacttaaatgcttatatacacagccattagtatggtgaccacatattttaagtactcaataaatatttgctggataaataatacatgaaaacacgtatttttttttttttttgagatggagttttgcgcttgtcaactaagctggagtgcaatggtgcagtcttagctcactgcaacttccgctgcctgggttcaagtgattctcctgcctcagcctccagagtagctgggattacaggtgcgcatcaccacacccagctaattttgtatttttagtagagatggggtttcaccatgtttgacaggctggtctcaaacttctgacctcaggtgatccgcccgtctcggcctcccagagtgctgggattacaggcatgagccactgcaccaggtcatgaaaacatgtattcttttaattagttctattaataagattttactgcatataggtaatactacttaccaaattacatttttagcttggaactgaatttgcatggtctatattttgcatctaaatatccagtaagtgtgtagaataactcaggcttcatttggtataaaaacgccttcctatttcaaacttgttttttttcccctttttgtggagagtggggtctcactatattgcccaggatagtctcaaactcctgggcacaaggtatcttcctgcctcttcttccctaaattttgggatcataggtgtgagccacctggcccagccaagcatgccttcttatttgtatagaatcatattttcaatttttttagtgactatacattttactaatttatttaataattagttttatatggctaatgatgaaatgcataattactaaaacttaatgaaacgtgcatttagttataatgcacaattttaccttccattttgtcaatcgtacttttgcaaaaccaattcagcttcaatatttgaaacatatgtgagagtatccctctattgtggataagagcttcgtactagaatattttaaaagtgaagagagaaaacgtggctcaaatagtctgaccaattacttagcatcttgtgaatattacaaagaaaaatgccttctaaaatgtgtttgtattttcttcttaacgttttatatatttagtgttcatttttatatttcctgaaaggaaatatgtaaattttgctataaaatcgagccatctttgtaaaagtgatcctgcttaaaattacaaaatctatctgagagtcatttataaaggtgtgaatgtatctggcagcctgggcaagcagtctgagttacttcctgatatatacatttggcccttatctggagaggactgtacatgtctgtataatttcttttgttgttttatttttttaaatttttaaattttattttattattattatactttaagttttagggtatatgtgcacaatgtgcaggttagttacatatgtatacatgtgccatgctggtgtgctgcattgttgttttattttgagagacagtgtctcacttcgttgcctatgctggagtgcagtgatgcaatcatagctcactgtcaccttgatcttctgggctcaagtgagtcttctgccttagcctccctgagtagctgggattacaggtgctcgccaccatgcctggctaatttttaaaatatttttgtagagatggagggtcttgctatgttggtctcaaacttttgggctcaaatactcctcccacttcaccctcccaaagcgctaggattacaggcttcagccactgcacctggctctgtaatctcttaattcctcttgagttagatagcagaattggcttgcatctggtctttatcttcctccagatgtaaaatccaggcccatcactgttgggtataaggagtgagagagaggggttactatttattccactcagtgtgtaatctattaagccctctgagccaatcaaaatcatgtgggcattgaagttcaaaaccacaacatagatgcattcatttatagtgacattgttgcttaggcaacaagaaatctgaatctcctattaaactagccaacagcaagaatttaaaatattttattttatatatctggtattttgaatcaattaatagagttttttttctgagaatgactaatagatacttagttttcatacaaagtttaggtgacataagagttacggctgatagctgccataacatagaagcataaaatttcatggtttagcacaaaacatgcttaaattttgttcacataaaatctagtggaatcgttgtggggtgagggggtgaggatcttgtatctctgatttgcgattgttcggggactcaagtttataaagatgtgtttacacggtcatcttgatagagactgcttctaaccattggcttctgaggtctcgttagcagttgacatccagctggtccactgaggaactgagaatgtgcaggatggtgcaggagattgtcacaggccaggcctgaaagtggcgtgcatctcttttgcttacattctgtaacctgttgtatggtcaaagcacatgcagaaggggtaggaaaatgaagtcttccatggagtagtcattttccaaaaacaacgcttctctgtgaaaaagcagcatgaatttttggtggtcagctagcttcctctgctgtgggaagagagtgactatgattgctgtattcaagcaccaactgaaaatcgtcagtgtaatggtattgaaaataaggctatttttaaaaatggaaacgaaacgcgattaaatccataattgaatacatttaggactttgctttagaactagaggagatgttatagcatcaagtagagtcccatttagatgattaaggagatattttggatttctgaaattaaaaatagtttttcctgtttttccctctggaaagtaaaaaatagtttttcccaagggtaaaaggggagaaactattttttactttttaagtaaaggtctaaaattccctctttctgtagttgctcaaataaaactgctaagcaagatgattttctctgaacatacgtgcaacacattaccttgtatttagtgattatgacatatgaacattctatgatgctaaattaaatttctgtaattaagaataacaatatccagatagtattttgcaaagtacttccaagtccttatgccattttagcctctcaatgagcctctgagagagacagaacaagtgttcttagcccctttttggacaaagaatatgagactatcagtgtttaaatgactagtttaaaattctttgggttgttaagggttataatccaaataatccaggattattgttaagattatagttctcattgtaatcctgtaatgttcttttcattatctgcaatgactggatctatctggacactagaaacggccattcgtgtacgtttttcaggttgtacaatttataaaaatgcccacaaatgcagttgatgtgagaatcaccaaggtgactgaagtaacggatcagcattactggtttattcattttgctgatacagacatattttgtgtattgccttttaagtatttatagagtagaattccaagagctgacagatattaagatattaagactttttcttttctttttcttttttttttgagatggagtctcactctgtcgcccaggctggagtgcagtggcccaatcttggctcactgcaacctccacctcccaggttcaagcaattctcctgcctcattctcctgggactacaggcgtgtgccaccatgcccagctagttttttttgtatttttagtagagatggggtttcactgtgttagctaggatggtcttgatctcgtgacctcatgatccacctgcctcggcctcccaaagtgctgggattacagacgtgagccaccgcgcccggccttggaatttgtattttaaaatccatggacaggtcaaaacatgttaagcaagaagaagatatatctaagagataactttgtaaaagtcttcaattatttgaagggcctgttagagagtggctggctgtgaggaacctggctgggaacacatgccagcaaagacctaaggacggcctgagaaatttggaggaagggggaactttccttcagagttattaagcactaaaaccagtcactagtgtttttagagaacctttacataattttcttgtaaaaggaatagattcttctggaacagttcattaaaagctctgcatgtatctaggagggaaaaggaaaagatgaaaaaaatagaggacttagcaagatcattttttaacttcaagtccccataggctgtaagttaatttactgacaaactatagaaactgtaaaagatttttccttttatatgacacaaaagctggtccaatgttatatattaactggtcattgatcagaagagtataacagaaatcatatctttaatataaatattaaaattgcctcagaacacatttaggaaccactgcatcctgttaatatagacactgactacactttgcctgccttttaaatgtaactgtctcagacattgataaaaggcactcacatctgcaagattccccttgttttttgtacaatgaaactctttttatcataaaatcaacacaattaaaaattcgaaaagaggtttgactcccatattactttaacaacatcccatttatgttctagtctttatttatattcatagattttttttatacagttgcaacacaacaaaaacatacatcattcttttattgaccacaggttgacttagtgccaactctctggcaggccctgttctagggctggagacactgctgtgaattaaacaaagtccatgcccttgtggcaactatattctagtggaagtgggtggggctagacaattaacacataagccaacaggtagataatgtcaagtggcaaaaagcaagcaagcaagcaaacaaacaaacaaaaaaaccacgaagaaaactgaagcacagaaagggacagagagtgatggggggctcttcaaacttggggagttagggaaggctcctttgagcagaggatttgactggagtgaacagaggaagttacttctgtgactgtcagggtaagtccattcctgacagaaaaacagcaagtatataatgcctgggaagggaactcgcttggcatgctggaggaggagtaagggacaccagtaagtctggagcgtagggagcaagaaagagtggtcagaaatgagatcagaggtcagcagagaccacctgataagtaccactgtgtatggcaggtattatgttgggtgataggaatacagacctgaccaagacagttcttaacttcaaaaaggttacattcaaataggcacatagatgtataagcaaataaggaacaacaaattgtgttaggtgccattataaagaaaggagtatagtgctgtgagcagtgtaactaactgcatcagtgagatgatgatgccgaaatgggatttgaaggatgagtacaaggtttccaggaaaagaagagaggaaagagtatttcaaacagagagagcagcacatggtaaagtcaaggagttgacagaaacatcctggcatgtttttggtttagcaaaatgtttagtgctgttaaaaaaagatgtatgttggaaagttatgggagatgagggtggaaaataggttagaaccaaattgtaaaggttccaagtttaaaaattttccaaactttacaataaagtattctagactattttctgtttttcatttgtgttatgttattctatagaaatttaaagttcttatccattatactaaactcattgttttcctgtgttattttttgctgctcctttaagcagcaaaaattattaacaagcaattaaaatattaaacaaagatggcttaatcattttttaagcagaggtaaccagaaagaattttcaatgacactttaatttttggtctttgaggaaggaatcaagaccttgaagttatatctatattatttaataattatttactttaaaaaatgataggtttcctagtttccttacagatactgacttaccacaagttctacagttatacatatagtaactttttaagggactatttcttgctcatgtaatattacttttcaggagatgtaatgtattttgaatggctgttattattgtttaaaatttattcacttcattgtcttgcaactaggctgaaaagttttagaaatgaattataaataaattctagattctgagcataagttttcccaatgtattattttaacctctgaacctcaaaagatttcatttcagactgattttattggttctctttttgaaaatggaagtgtttctaaaatttctagaaaagcctggttttttttaataagaaatcataatcaatccataagtgttattcactggatagatttaaggctgataaattgctgtgtcccttgatgctcttcattagcatcagaagtaccatggtgaaataatgttatgggaacctcaggctctggggttttacagaggagcaggcagtgccctgagagacagcactgggtcactgggagttttcacaggtgccttcctggctatgctgaggtccttttgttagtgactggcaatagtcacagttcatttgggaatgggcaaggggacaagctggggaggtttcagcattttagaatatacatgtctatgcaaacaaaacatgagcatcatctttgattttgaaacataactttaaagtggaagcgtttacctatataaagtggacatttccagagcactccattaccaacaattggcctcacatatctaaaaacttgactgtagtcttattttaatggggcttatgtaacaaagcttgaaaacctgagaatattaatttttttgttttttttttcttttacaaaatgttatttagaaaaggacgttttatgtctccaaaagacggtgaaacagaaatcaaatgactggaaaggaactggaaaggaaattaacatttatctgtagatgggcctttatatatgaatccaccgaactgtcacaattgttgcacagacataattagaaccacatttttacagatgagtaaactgaggctcagagaagttgaatgacaggtctgtgaattggatccagatctttctggctccagtgtcccttttcacactgctcctccctatcatgagtcccagctctatttaaacatgtcatttgatatttttgagccgtagttctgctctagttaattatcacaacataacaaaccaccccaacacttagtgatttaaaaccgacaatttaaattctctcatactccagtgggcccaactggctttcttacctggtggtctcagggaagtattccaaaaaagtgaaatggaagctgcgagatctcttaggacttctagcctctagaagtcatagtgccacttcaccacattctattagtctcagaaagtcacaaggccagcccagattaaatggtgggaaatagattctacctcttgatgggaggaactgtaaacatttcatgaccatatgccatcagtcactattcttttctgtctttaatttttaacacattgtgttatgttgtattattaccaaagcactgaagaatgttagcaagtgaaactttagattatttgtctctaaaatgtgcctcctaattttgttctgctttaccattgtgaagaagatatttgaaaggaggtaatgagcatggagatgctttgaaaacctataaatagagccctttataatctaagatgttactatgatttatggaagatgctagtatttattgtagaaatgatatttcatcaattaaaaaagcagatgaaggccaggcatggtggctcatgcctgtaatcccagcatttgggaggctgaggcgggtggatcacctgaagtcagaagttcgagactagcctgaccaacatggagaaacctcgtgtctaagaaaaatacaaaattggctggatgtgttggtgcatgccaccatcccagctactcgggaggctgaggcaggagaatcgcttgaacccgggaggcggaaattgcagtgagccgagatcgcaccactgcactccagcctaggtaacaagagcgaatctctgtctcagaaaaaattaaaataaaaataaaaaagctgataaaaaaatatatgaaacaacctcctgttcatagggcatataattctttcttctagacttacagaagcactaatggttttctgaaacgtaataatatgtggtattttttattaagtgttttgttgttgtttgtgtgtgtaaaatcaaacagtgagtaaaagttgaatggaatcggttttccattctttgggcagttaatagtattacagccagatgtcctcatacaaggaagtctgtgaaatcatatcttgggaatagaatggttttcactaatgcagaaattcctaactcaaaagactttcccaaagagtgagattcctcagttaaatctctttctaagaatctttctaactttgaatatagatttcataaaaatctcaaatcattgataagctatagttttatgaaataaattattactctcaactccttacttttctaaaatctattttttttgcatctcaaaatattattacagtttgctaaaatgagttttaaaatggaaaacctacatagtggtatgaaacagatatcctcttgattacttctttttttaagggatgaataggtgagacgttagaactttacttaggaagaggttcttgaaaattaaccctgaactatctgttcttaaatggcccaaataactgacattataaagattaaaagctttgagtttggtccttttttggagttgcttttatatatacatatctacttaagttgcgttctctaccatgaaatctggggattagaaaatacttagaccaagccacaggcatattcgtttagctcacattatgttttaaaaattgagttagttgccaatgttttaatcagaagattttatgtaaaagtcttaaattctagcttcgtgataaaagtcagaatacctgataatattgggccagcattcccactctaatataatgttttgaagctgaatagaagttaccctcgttagacgaggcacatgcaacctggttaccattattttcactttccatacttttataatctgcctggttgtcctaggcatttgagtttgagacaatgacagagttgtggctgaaggattcaaacatgcctctgacgtttgataaacaaacacaatttgagggctacttctgggcatatcagtggtacatcagtgacaaaggattgagaccctcagatggatgggtgcaaagagaaatgaggaacttaagaattccatatgccacctgatcaagctctgaatagcagtggtacaggttctgcccatctttgaaccatatcataaaacctgattttggcagtaatacttcagcacagattgtacctgctgtttttaaaatactgcttatcagtcatttttagcatcatattgatatcaaggccaacacagcctaaaattttgacttccctcaatgctgctgaaagctacaaagaaaggaggacaataattataatcccaaattacccttaattctgaactcaggaatttaggcaaactaactaaatagtagacctttcttttgatcaaattttggattggcacagtctttaagagatgtgatatttgatctgtatttttgttaaaaatcttgtgaattctgcagtgaattttttccagagtagttatcattgtcctaccaattagaaattttaatgttgattaaaaagcaaaacggtccaaatgtctgcagttttactttctaaaacagagaaatgaaatggatcagcactacagaaaattatcaaaattagcttttaatagcagtagctaacgttatgcagtgcttattatgtgccatccctttgagatagatatccccacttttagatgagaaaattgaggcatggataggggattaaatttgtctaaatttgcagagcatgaggatttgtttctaggaatttgtttaaagattatacaatgctttgcgatggttatagtcttgttttatagattaagtgcttttaatcgcttggctccaccctctttcagtttgcgctctctcagacatacgtgacagccaccactgaatttcacaaaggtctttttttcagacattgtaagaatgtgcaggagtccaatgttttttgggctttggggacattctgtatgaaacttaaggatttatagtcatatgtattgtaataacagacaaaaccaaaattcattaatatgaagattggtagaaactgtggattttccttataaaacaaaatcatatatttccattttaaatgtcatttttttctcttctgagattgtttgaatatagccaatgtgtgttcttaaatttagtttttaaatgtggtaatgtacaaagatgaaaattacggtgagactatttggatttttttaagaatggcatctggccacagaattgcaatccatacactacacaacataaaaaacatacattacagcactaaatatagttcaggcttgcctttgcttctgacttcaaggactgaaccatataaacacaaggcagatgaactagtgagaagtcacttggtgtagaagtccttgttaattaaagtgtccatggaccagcagcatgggcatcacccaggagcttgtaaaaagcagactctcagaccccagctttgacctatggaagcggaatttatatttacatcaacagattattcctatgcacactaatgtctgagaagcattgggttagatagattggattctgccagtctctgggaattagctattcatctttgaataagttactatgttctatgtattttagtttcctccatttcttgctacttactacatgttgatttagagcaacttaattctgtaatcttcatttagttgcctataaaatagggatattaataatacctacctcctattattataaggattaaatgaggtaatgagtgtaaaatatatagaatattgtccacatatagtatgtgattaatatgtgcttgtgatggttcttttagttatttctctggtgcgctatataatcttattgattacatgacaagtggaattagaaatttctttcaaaatctactacacagatatataaatatgcttttaaaaatcaaaaaattagaaggagataaattttccaagggttaaagagtctagtggaaaaaacactggaatgggaattacacagactaaactctagtcccaattcttttgaccttgagcctgacatttaacttttttgatttcatggatattatataagaatataaaatgccttaacatgcttatagtgcagttatatagatttatagaactggcagtaaccaattattatgcatacattgtcttaatctatgagaatttgtgatagggtgttcaggtgactgctgttctgtgacattatattgggtacttgtagaagtttcagtaaatccttcagattattaaattactgtttaagctgcaaacacatgtcctgatttcctatatctaatcccaaatccattatttatataagaagtagttcctttttgtgtatttatatttattttatttatttatttattcgagatggagtcttgctctgtcacccaggctggagtgcagtggtgtaatctcgcctcactgcaacccctgcctcccaggtgatcctcctgcctcagcctccaggcatccaccattacgactggctaatttttggtatttttagtagagacagagtttcaccatgttggccaggctgatctcgaactcctgacctcaagtgatctgcctaccttggccttccaaagtgttgggattacaggtgtgagccaccacgcccagctaatttgctttttgaaactctgtttattacgcaataatgccaacacatttattaaagcttcaaataaaagtcagctttcctctcctctttatgtcatatgttcatctaggtgatatatgcctgaatcattgcaggcacacaacaaaccttcaccaaataagacagtaactttacccttgttttctgctctccattaaataattcactggaatttgttgcttcccttttatgttagtagagtctgtaccaaaatatcaactctatgataaccaagaactttgagttaggagctcattgtaactcttctttgcttgaaaatctgtcccaaattcataattaacttggccagtgtttatattggagtagagtatactgtgaaacttgtataaatgaatagaacttcttggaccttccttaatctgtggcttttgtttctctttttcaattattaatgataaatcttcccagtgaacatgcagccaacacattgaataaatatttcaattaagtcggatgttgatgtgaatgcaaattaaattaggcaatttttctgcttattttaatatatctgcaaatcatatcccattgaagtgctttgtgatgttttttaaaaaagagataaagtgatctcttaaaaactgaggagtgctgttatgcttaagcatcagattcataaataaataaagacatttcttatcaacctatctctgagacaaagacttcagccgttagaaaaaagacgttctcaaaggaaccatgttcttaaatacaaattttgatacttatctgaaggggatatttgattatggattcaaaacaatacatccagcactaagaggaccagaaggaatttatgtgatggaaaagagggtgcagcacgtgtgtgtgtgtgtgtgtgtgcatgcatgtgtgtgcgcgtgtgtgtataaacattgaagctgcagtgtattacagttatcttcttgttagcagcttttaaaagatgtaattgacatagatatttagtgtacatatttagtgtggggtacaatttgataaattctgacttatgtataaaccataaagccatcactgcaatcaagataaaaaacacatttagttactaaacatatttagttattggaatgtcagaaccagatttcatcaccagtaaaaattttactttatgttgcatttcaaaaattaagttagatttgtgtatattcatttgtgtttagtcacaaagcattgtttttgtaactaattaatggtttttgtcttgttttttaaaaaatttagggtgtggctggaatgcatgctgtagcatgactggcctccagtggtgtctttgaagaatagcatcactgggaaagtcaaagcaacaggtgaaatttaaaagataagagcaatttgcacatcagctaagatgctgtggcacagtctaattggcaggggctggtgaaatagaacattagatcttcaaaaatggaaggtgagaactaccctcttccaatgttgggattcctcagtggcaagaagtgctctgatgctgagtgatgcttgactgcagttattactcaggaatttttcacagaggaaacatcaaggtttatattgattttctttttctagaagagacttttttaggctgcatttttttctactgtgttgatgcttcagaatatatctttattatttaccttttttccttttgtgcctttttcttcttacagcttttaatttggttatatactccaagaactctaaaactgtacctatatgagtaaaaattgttacacataaaatgcgtttttgatttggagtcattttaatgatgaatttaggtgcctgagagtgtgcctgtgatttgtatcaggcacgaagacaagaaatgtttagatcttgaactgctatgttctggcatgtcctatctctttattctttctttctattattctattgttatccccagtagaggaaatgtagaatcacaaattagattatgaggattgggggagaatctaggttacaataagtgaaacagatttatacctttctgtttataagtataataataattcttttataaaaatagaattctttatcatatgaaaaggagaactagtttcttgtataaatacatttgtactctacatctcactgtctgtgcatgctcatattatgtcttcctacagtttttgtccatgcatgtttatagtagttaactgcaggctctcatctgtgctaatgagtctggtgagccacttcgttggctgccatgtggaatctgagcacatctttcctttattccatgtccctctggtctatcaccaggctccactgggatacaaaggtgcatattgtctgattagaacccttcttccccatggtgctctgatgaggggctgccaaagtagtgtagctgtgctccagcgtcttacaaagttcatcccgattcttcctatagggttcaaatataaggagcactcagaagctgaccaggagttcagtgcctgtgacagcaaccagcctttcctattttatgaaggacaccttgtcactgcatgggtctccttatgaattgctccatcttccgtttgaatgagctgtttacaaaagtctcccagtctcctcatcaatcaggattaattgatttgttaaataactgattaatcactggaaccaatgaaaccccaaaatcacagtgacttaaataagatagtagttcatttctctcccacataaaataaatccagacgttggtaacctggggctggtaaggcgctccatgggctcaggaatccagggtccttctatcttgcttctctgccatccttaccatgaggcttccacctcacagcctgagctgatggttcaagctgtaaccatcatgtccagcagaatcacaaaaagtggatagcagtatttatgctttatctttaaggccacttccaaagctgcaaataactctttttaaaaaaattctattggtcatcacatagttacatgaccatactttgctttagatgagactaggaaatgtatgctgcaggagcacatatgcagccatgtgcccaactattactattattattattgttgttatcattattattttatcaaagcaagaagggagaccatctattgaagaataagccttcaatgctgtatgtagaaacatagaaaaaaacccagtaagtcgattttgccacaatacttatgcaagtaggtctctggaagactcattctaccagtccacacaatttgtctaagtctgggcttaaattcaagctaagacctactccattatactttgcttcattgtaaagtaccatatgccttgggcaaaagcaatattaattgcttccaaagccatcaagggctattttatttggacctttctgtggcaaatattatcactccttcaattccagatttgggctaggatgtctgtcatttacagagttgtccagtgtcacttttccttttttatatcattagattttcttaaagtgagtcactcatactctctctctctcatatgctggaatagtctatatgatgtgacctttgcaccagttgtgccagatggtgtgctttcatgacaagtattcactcccctaaattattcccacaaaaaggtatagctgatttctttttttctgatagatctctgtgctagagttaagttaatagaactcattcagattggttatggttgtcttcaggtcactcagcaacataattccttttctctgagtgagtcctagcttatactctgtaaggtagatttggctgcgttgagctattgtctaagagtggtagactccagtatgcaaattgcacccaatttatacagcttgggagtgtgttttcttatcaaagattactctatttcctaaaccaaagggaaaataaattaggatggactagtgttagagaaaaagctactgcttttggtacatgttcatttcaggaagcactgtataaatgaaaactttccaatttttgcccaagggctgactctgtttgaaggactattaattttagacataatcaagagaaattataggcccagatgtagggaaatcagaatgctgcaaatatttgagcactattaattattttagcttttacaaagctaactttgaaatttgagttagccattagctcaaagtaaaaacccaaaatagctatagataaattttcctcttgtatatatatgtgtgtgtgtgtgtgtgtgtgtgtgtatatatatgcacacacacacacacgcacacacacatatatatgtatatatacacacacacacaaatcataaatgtgcttgtgtatatataagataaataaaatgataaagtctaaaatatcttagtggtttataaatgctattcatgtaatattggacaagccatgtttcagagtttccactttctttttatatttgcctactgagtgaaatttatagcattgaatgaattgtttggaaaagaaaaaagattaaaatccatcaatctaagcttttatcatagaaaactagagaagataaagaactatataaacctaaagcaaacagaagaaaagaaataagaattacagcagatacaaatgaaatttaaaacaatagagtaaaatcaatgaaaccaaaagctgattatttgaaaagatatataaagttgataaaattttagtcaaactaacaaagaaaagaagaaagaaaacacaaattcctaatatcagaaatcaaagagggatggatcatcaccgttgattccatggatattaaaagagcaataaataaatattatgcacaacaactaagatgaagtggactaattccttgaaaagtacaatctaccaaaacctatacaaaaagaaataggtgatctgtaagtctgtatctatgacagaaatcaaatcaatggttaataaccttctaataaataaagcaccaggctcaaatggtttcactgatgaattctaccaaatatttaaggaagatatgataacaattctctacaatgtcttccaaaaaatggagacagaatacttcctagttaatcctatgaggctggtataaccctaattctaaaacccaataaagacaggacaagaaaggaaaactacagaccaatatctgtcatgaaaataatgtaaaaatattgaacagaaagatttatataccattatcaagtgagatttattctgtgtatacaaggctggttcaccattcaaaagtcaattaaggtaattcatcacatcaacagcctaaagaagaaaaatcgtatgatcatataagtgaaggtagaaaaagcattagacaaaatccaacacccattcctcaaaaaataaaaagaatcacagaaaactaggaactgaggggaacttccttaacctgataaataacatctacaaaaggcctatagcaaatattagacttaatggtgagaaactagctgctttccccctaagactggcaacaagtaaaaatgttttctcttactctcatattctacatcatactggaagcttagctaatacaataacacaagaaaaggaaataacagatatattgggaaaaaagaaataaaactctctttgttcacagatggcataattgtctatgtagaaaatcccaaatggtcaacaacaataacaaagacctcttggaactaatattgatgatagcaggatcacaggatacaaggttaatatacaaaagtcagctgatttcctatataccatcaatgagcaattggaattggaatttttcattagcaccaaaaaatgaaatacttatgtgtaattctaataagacatgtataagatatatatgagaagaaccacaaaactataatgaaagaaaccaaaggagatctaaataaatattccatgttcatagataagaagactcaatattattaagatttcacttcttctcaacttgatctatagactcaatacaatcccaatcaaaatctcagcaagttgtcttgtggatactgacaaactgattctaaagtttatatggaaaggcaaaagactcagaataataaacacaatatggaagaaaaataacagaggactgacactacccaacttaagacaatataaagctatagtaatcaagacagtgtggtactggtgaaagaattaacacatagatcaatggaaaagaatagaaagcccagaatagatacacacaaatacagtgaactgatttttgaccaagataaaaggcaattcaatgcagaaatgagagtgttttcaacaaatggtgctggaataactgcatacccacatgcgacaaaaagtgaatctagtggcagatattatacttttcgcaaaaagtgatgcaaaatggatcaagagttaaatgtaaaatgtaaaacgatgaaacttctagaagataacatagcagaaaatctaggtgaccttgggtttgatgatgagtttttagatacagtaccaaaaggatgattcaggaaaacaaaaattgataagttgggcttctttaaaatttaaaacttctgttttatgaaagacacagttaaaagaatagaaagacaagccacaggctacaagaaaaaaaatctttgcaaaacacatatctgataaattgtagccattatatacaaagaaatcttcaaactcaacaacaagaaaacaagcaatccagtttacacatgtgtaagtgatctgaacagataccttatcaaagaagatatacagatggcaaaagatgcatatgaagagatgctggacattacatctcattaggaaatcacaaattaaaacaagatgttgttttacagtacaaacctattagaattactaaatccaaaacactggcaatactgaatgctggcaaagaggtggaacaacagaaactgtcattcattgatgttaagaatgcaaaatggcacagccacttgggaaatcaacttggtagtgtcttagcaaggctaaacacagtcttactgtacaatctagtgatcatacttctaggtgtttactcaaatgaaatgaaaacttaggtgcacacagaaatctgcgcttgaatgtttacagcagctttattcataattgtgaaaaaccagaggcaaccaagatatccctcaatagatgaatggataaactgtgatattacagtttacaatggaatattattcagtgacaaatgaactatcaagccacaaaaaaatatgcagcagctgtaagggcatatggctaagtgaagaaacaagcccttttgaaaaggctacataccatttgattcaaactatataacattttagaaaaggcaaaactttagagatagtaaaaacatcagtgtttttcagaacttttgtggggagaaggggaagtgatgaatagatgaagcacagggaatttttagggtcgtgaaactattctgtatgatcttgtaatgctgtgtgatcctggaatacatgacacaatgtacttgtccaaactcatagaactgtacaacataaaaagtaaactctgatgcaaattatagaccttaattaattaaaaaatagaataaaatcaacaacaaaaacatttttccgaattatagagattactgttgataacatgttcatgtatctctttccaaatgtatatatgtaaatgtatcataattagttttttacatacatgaatgaatttgatatttctccctacactgccaaaaatcaggctttgactaaatacagagtaactttttgcagagatagtatttcttctagctgtaagaaggaaatatccttaatttctctaggaaattcaatatggatcccaagggatgtgtcaaattctaggcattagtggtgttaactggactctaaagatacataactttagcatttttaattatcaatattccttccaatgttcttaggcaacaacaaatttttcattctttcatacattcatgcattcattcatctatctaagaaaaagttacagagctcatataacacgtcagttaatgttttttggcaccaggaacttgtcttagtggagtctgtatttctatggagagaaaaaaaaattcaacaaataagaacccaattacctatattactagaagttgtggtaggtgctatgaaagaggacacaggtttgtataagagagttttacaaggagacctggtttggcttgagttgggaatgcattaagggaggcttctatgaccaagttatactgaagttgagatttgaaggatgagtcagatgcaagaatgaggacaacattccaggcagagggaagtacacatgcaagccctgaagtgggaaagaccttgatgcacatagggactgaaagaaggccagtgtcaccggtgtatggtgaggatagagaagcaaagagggtccagctcatgaaggctttggagttgttactaagtttaatggaaatttattggaattatttgggcattggctaggtggaaacaattctataatttgacactgttacactgagaggaatggtggagggatggagtagaagtagggtagctgataggatgttatggttatagacctggtgagcagcagcggtggctggtggctgtggggatgaaaaaaaagtgtacatggaagatatattttggtggaaaaatttataagactcagggatagattgaatgtggacaactcccaggtgtttggctgggtactattcacttagatggggaagcctggagaaaaaaacatttcgggggaaaaaatccaaaaatagtatgtgagacatcaaagtggatatgtcagatgggcagctcagaaaagaggctagaaccagagataggaactttggattgagcacatatatgagatttaccaccatgggagcagatgctgctggtggggcgcatgtataggctaagaagagaggaagccccaggacagttctgaatttgagttccgatagaaaaggaggacacctcaaagaaaactgaagcaaagcagaaagaccatgaaaagaacaggagaaagttgagtgccagaactaagaaaagaaaattccaaaagaaggaagaatgtccaactgtgaagtgctgttaaaaaatcagataatctgaggactgtcaaatctctatgagatttggcaacgtggaggtcactagtaatttagtaagatatttcctagtatcttaatcacatacctagacggaactgaatttctagatatcctcctctttattgttctcaccttttgttccaggactaacttcattttcagttcctcttcactttcccaagttattttcctatccatctattctcctcactttgggccaatagaaaagtgtaacacagggaggaggggaggtgaggaaaagaaaacaggacaaaagttaatgcaacatggtatttaattttgtgcattcttcacagaattgcttttcctccttgtatttgcctaagtatttcatttacttagaaaaacaagtatattttaattttaaaatattatctgtttcatcatgctcaacataaatgtaatcctgtgttgtctactcctgaagtgattaaactataaatagagctttctttgcaacttaatttgctataatccttagcataaaatgaagatgtccttaatgtggaatgcaaatactatgatatggctgatgtcatgaggacttgaaacgtttcatcctctttcactaattttttttaaacattcatataagaaaagccttggcattaaatgctaagaaataggtgcttagatggccagaaattgactgggtttgatggccttcatgatacaaaaacatcaactgttttaaaaatagtattatctaagactgaagatttcttttaagtgagaaatgtattttgaaattaaggaaaagaatgtcagtgatgttttaatggcaatttttgaaagtagtcaaaagacactccagtatatatcgtcatgaatttatgactaatgactaaaataatttagaattctgcttagcactaatcaaaatccagttaaaagactgcttttgtacttttgaagcacgtaagatctttggaaatgcattactgaatattatttgtgcttttaatgcttcatcaacatttaggagtacaagcttccattgtcagtgttttaaaagtcagctatgtaaagctgatagagtatacatattaaatatatccattagtcattctcaggaagtggaatatgtacacacatctgaatatttgcttaaatataaaacaagagtaagatgtttaagcttcaatgtagaataaaatactgatatttgggttttaggttaaaaaatattagttgtgatttttgtcccccttttcctccatgcctttgattccttccctctgaagacagacaaaatcctgacttaggcagtattttttaaaataccaagggtctcggaaacctagggtttgataagtaagaggaacagatcaaattctaaatctcctttgtccacattgtcattctccagcttgttgttcttttcagtggtgaggtaagaatataactcctacttaatgttcctgttccttaggtgaaacactaccaccttttgttcaaaagttagatgctggggttgttgctgttgttgttttcttcttttcttcctttactttttagattttgatggagacgtggtaggaagtctgggctgggaaatgaggtgaaaaagaaaagcaattagtttgtctttatacaaaataaaaccttctaaaaaaccttattatcacaaaaaagagctctacaaatctagatagttgttttgaagaagagaagagaattgtgaaaaacatgtataatttgggagggctgggcacagtggcttatgcctgtaatcccagcactttgggatgctgaggcaggcagatcacctgagatcaggagtttgagaccagcctggccaacataatgaaaccctgtctctactaaaaatacaaaacattagctgggtgtggtaacacacgtctgtggtctcagctactttggaggctgaggcacgagaatcgcttgaacccaggaggcagaggttgcagttagctgagattgtgccactgcactccagctttggtgatagaacgagattccatctcaaagctaaacaacaacaacaacaacaataacaacaacaaaaacatgtataactgggaaaaaactgaaagagaatgcaggatcataaaaatatagcaaacaaagtgagtgggatttaaaattagtggaataagaaataatgggtaacaatgaagaacataatttaggtaatagtatagtatcttgggagccctcctggaagtatctagttatggacagtgagcagcagaaacaggatgtaactcaattcagcatacttgatggttgtggtaaccctagaaaatgactccaggaaataggtgagaatccaatcagattgagaggctaatgttcatgacaggggtgccctagcagacaggcaaagctgaatagaaattcaggaggagaggaattttggctatttagtaaaattatgagcagttggtcataggcaaattttatgagtaggtagcccttctgaagtcttaggcatataattaacctaggttggaattataattagacatcaaagtttaaacttttttatctgaaccgagatgcaaaagtaaattggttctgtgttctggagaattgtaaaagaattccttaattccttagcaaaatttggaagtcagtatcaagtggtgaggataggaaagttgaagagactgtggaccaggcaagaccttatcagttgatttaggaagcagcagtgacagaggccagacaggtaacaagagaaaagagaaggtggaaagtaagagacagttttaattgctacgatagaaagatgggattttgaaaagattagctatatggaataaaattaaccaaaaattgatccaagattataagaaactatttcaagactcattaattttactattgctgtcaaacacacattaaatcattttccacttgggtcagctataggcatgaaggttcatttgtgaaacaatttctgtagagtattattccatgatctgacatgcttcacaaactgtgtttgtacatccaacttaaaagctgaatagtctatggtaattctgccatcatgtttgaaattttcttaccttaaacaaaaaacctgatcatattgtattactcaaatgtgtgtaagactagatttaacttaatgtgtactagtgtacagtgtgagactgcataaacaaactttaaagaaattcgttatacatattttgatttaacctacaatgaagttaagagaaatccttaaccccattagagatttgggagagggatgtggcaactgctaacttataaatattttgctaatgcttaaattttactagctttctgtcaattcctatttttactcaaaaaattatatagtatttaaatttataatttgtattcagttattctagcttactattatatggtatggcttgacggaaaggacattgtcttcttctcttctgcaaagcagaaaaatatccactaaacacaaaaatatacacagcaaatgttaaagtagccctctaaaccttatgaagacttttaaatcctcaaatagtacttcagagcaactggatttaatatctttcatccagcagagggctaccaaactccattagtttctgtgaacacacatgacaaaaaaattcagatgggttatttcagtggttttcagattgttttaagcagcagatccttttcttaagatagagttttacagtgtggaagtgagatacactctctgctttaattggagaagggcctccaagctgcctctccagaaggcccagagaggtgtggaggataattgaaaccctccactctgatttatccaaaaatacactcccacatttaaagtcagctctttttgggatcagtcgtaatccttaatgctgacaccgcatggaaaatatataagcagaatgatgcccaagttatagaagttcctcttcctggattttgtcttcaattgtaactgtagttcctaccgtgtggttgtatgtgttgttagtttgtttttgttttgttttgtttgggaaaggtgacatttcatctccaatctaatgagtgagaaagatgcttattctgacaaattttcttcacaatatttcataggtgtgccaagctgacagattggttgactctgtactcttttattttattcctgtaactgggccagtttctgcccttaactaaaactggatcaattataggagtgaaataaaggtccatctcctgcctatttattactttgctttggtaataaatctatttttaaaagaacctattacagagacttccatttggaattatgcatacttggtgtcaaatggtgattgttctttgttgtgtttttccattcgaaacaaagcttttgtgaggcgtccctttattctgattaaggcctggtgtaaatctttgataatgaagcccattaacaaaaatgactataaatagctctacttctatcagggatattaaatactttctcaagcacacatgctcactgattttaagactcattccacagtgttccaagttgcgtgttagattttttttttcttgagacgaagttttgctctgttgcccaggttggagtgcagtagcgtgataacggctcactgcaacctcagtctcccaggtttaaacgattctcctgcctcagcctcccaaatagctgggattacaggcacatgccaccatgcctggctaatttttgtatttttagtagagatggggttttgccatgttggccatgcaggtcttgaactcctgacctcaggtgatctacccactttggcctcccaaagtgctgggattataggcatgagccaccgcgcccagccagtgttggattttatcattaccaaatagtcataaagagtgtgagcttattaatgatgctgaccattcaaagtgatcagcaatctctttgcacacacactatctctggggatgagtctatctatttccagtccatccatcttgttttggtcttgtaaatctactttattatcttatgcttttatattcatgttttgtttcagaacaataatcatagtagtatcatttattgatctgttaccagtgttttacatgtgctatttcacttggttctgttaggtagatattgtcttcattcatgtgaaatgagattgaagcccataaaggtgaagtaatgcacccaacatagaacccaaattaggattcaaaaacccaaatttgatgccctctaccacataaagaagctttatttcatagcagtagcaaaaccattatttgatcagttaataaaaaagatggttaaagtggagaaaaaactgatatatgcgtagtttaaacattttatttcaacttgaaacacgtaagttggacattcgtttaccaatgatctgatgtccagtcaagaccttttatttaagtatattttatttaagaagtttccagaatttggggtttagctttgtgtttttaaaaataaacaatacctatttgtaggcattgtctcactggtttgttatctgttaaaggcagtcagtaattaaagacacttgcaaaacaatctgattgtagaacttctaaatattttcgaagcttcctccccaatctttttgatttgtttcagacatacccataattcaatagcaatattgtagaaattcctttttattaagttcttacaaagcatgcatcgtaattttcataaagcaataatttttggaactcatttttattagataatctaagatttatttaaattatgtaattgcaatagcaactacaataggatcaaaaggtttgggataaacatacttgactcttgctgagcatataactttactagtgggagaagaatgtacacatattatagaatggctagtaagctacaagcttttaatgtatggtgggcatcagtcagcatttatagagaaaatggaaacattttcttaagtaaagtttcgctgagagagcttctactctgtttttcaagaaattaggggagagagagaatttactccttgtctgtgaagacatgggatttaagctatgtgtatcacaggacttgaaacagaaaaaaaaactctacagatgtttttattttacaaagttagttgggttaaatattgcccaaagtttctacctgaaccatcaagtttggttttcataaaaagcttttaatttgtgagaaaaatgttatttgaattctttcaattacatcttatcagattttggtgatgcttttgaattctcaaatgtttcaagttgcaattctctgttaagatttattacatcattatcaaaactttgtattaagaaaagagtatatctttctgaagtcccgtagtacatattgtttctgccattcatttgatgcttatatttctcatttgctaacatttataatcatctgttcttacgcaaagcagtatgtcttggtggagaggtagtggaaaaaaacaaaaaacacccatgaaataaatctgtactcaaagaattcagcttgcttaacttcccaactaagtgatactactttggggaaccataactgctttccttactccatcccttttgtttcacagtgccttgttcacagctcaattatttgaagtctttatagatctgtttctctcttttgttgtttctgctgtacacctggttgtctttgacattacttctgccagtctttgtggtcacaagtgacttgtggagcattttaaaccaagttcgaagcttgagttttgttgtaagtctcggcaataaaacccaggttataaatctgctgaaggtctcgttatttattattctgctcttacccttagagtattgctttttgaggtctcagatgactgtgaagagggctccctattggactgtgcaccttgtgtggacattgaccttcgatatctgccttcttgcctggaacttttcaaaataaaagctcaagtttgcagggaaatgcacttaggaaacaaaagcaatttccctgcttgcttatctttcagtggttccattttccttcagttttgcctagcaattccttattatcattccagctgtttgttgcttttaagaagttatttatattttatccagtatttctagtttgtttcagcagtagtgtttgtctgaatacctggctcctattagctggaaacacatgctgttcatacaggtgcttagtgttttggttgttgatgtgatttagaagtgatataaagaccatgtcacacaaaaaagctcaaacatgctttacctctgaaaatgtggtttctaaagaagattttatttaattttatacttaggtttccatatttatggaatatgagtttgcacgagtgggcataaaatgaaaagtgctggtcatgctgttattagtccgttctcatactgctaataaatatataccagagactgggtaatttataaaggaaagggagatttaatggactcacagttccaaatagctggggaggcctcacaatcatggtggaaggcgaaggaggagcaaaggcacatcttacctggccgcaggcaagagagtgtgtgcaggggaactgccctttataaaatcatgggatcttgtgagtcttactcactatcatgagaacagcatgggagaaacctaccccatgattcaattacttcccactgggtccctcccatgacacgtggggattatgggagctacaattcaagatgagatttgggtggtcaaaccgtatctcatgcctaaagcaagaaacaaggaatccctagcaatagattttatttgcagtttagttaaacaacaggtgcaagcatatcttatgtctgttggtaaagaagtgaaaatggatcacagaagctctttcagagggaaaaaaagagttaaatatgatagcatccagaagcattaataatccagatgtttacaacttcataaaaattgccaagtacgcatggatacaatagtcattttcaccaggtgaaaaatgaccagatggtagcacttcaattctctggtgccaacaatgcagccacagggggattgttttttgagtggctgtgctattgaaacatgttttataagtattctatatttatcgtagtatctgctgcacaggactttactagccatagaattggttgttggaattgctgaaagtgtttatgtttgtgttttaacaataagggctttgggttgggaaactggagacctgacactttatcagtgatttcatgtttgatctatagttgatttggatgtgctctaatattacattttgccatttttctattgttaattttgaaaaataagaaaatatttttgctaattatttactggccaagcatactgaattcatggtctataaaaagtacagaataatagcccagtcatttaaaatcacatttacaggcttttaagcattattaatttatatgtaaatacaaaattattttgtgaaaatttaagatacacatggcttaaatttagagtcacataaagaataacaattaaaaatagttctgtcccaattaggagaaatcaatctttttcttttgcaaatagtctaattaaaatattctatcaaaggtttatccaaatgacacatctagttgacactgtataaatgtaaaacttacaggtattgatcaaacttaccaataaaattgtttcccttgagatgctaaagctgttaacatataatttctgagtaaaaatataattactaaagaaaacaacaaatttcttcatggataaaggcacgacataaatgagcacacaaaagcatcctcagtgaccttgagggttaagaggcttgagattgaattttcacattttaaccacaattcagtgcttttcatttgaccaaagtaaaagggctaagaaatatacccagagcttttataaaaagctgttacaaaccaaaaggggaagttatatgtgttttaaaacacggcaataaatagaggagttagatattaactgtagtgttccaatcctttaatagactatgaggatttcttatccaaaatcagtatattttttggaaaaaaaaccttgtgagcaatagaataaaatatcatttatgagaagaaagcagccctgagaagccatttgaagatattagtttcaaacttgggctaagcatttgaagattttgaagcagctttctatcaagatgtgaatattagtaattgcagtcactgtagattatacaaagtgactgaggtgttccaggaaggctgaaaagaaacacttctatggctggattttcatatccatgaggacaagggttttgtcatttttgttaccagatccccagtgcttcctggctggctcatagtaggcctttagtaactgtgtttgataagaagatacaaccataaaaagaagctgtgtatgctaataagatggggacaataagaaagtttttattttaaataaaggatattttaaaaggataattttaagttcaatccctaggctttcagtttaagatactattatagtaaattaaaagaatgattttaacatcctggggcttttctgattctggaataaatttctttattttctgtcaaagagagcacacaaaatacatttgtttaggaagttctagtgaggggattttttcatcagaagagttttcacaactagcaaatccagcctgtttacacaggcagactccacaagctgggctgttgcacactcatctttgtccatttgggaatgagtgattgaggctggagtggggttgggaggatgcagggggagacagaatgtgtatggaaatgtcttttgcttctgaactgtggctttttcagtgttcccttctctgtacctttcccttccctctgcccactgcagtgtggctgctgcctgtaatccccagacttcctctgtcataataaagggaggtctgtggtgacagaatggtcactatttatgacctacactttctgcagctctatcttctttatgtcaaggggtgtcccgagggtagcttttcattccttgtctgttggccattgttactagctagaaattttctgtgaaacttcagaagtgttatgagcttgagaggcatacacttggggggtcttgagactgcttctacatctccttctcagcctatgaaaaccgcctgttttgatttggagctggagtgtccttgtttcctttcctcaggcaggagtagaaggaagatatcctttgggcattctcattttagccaaatcatctccttgtggaaacattcttatcacaagaaagtaggatctattatattatgagcaagcttttcttggtaattttgcattatcaaattggcttttgggtttggcttcaggtaaaacaaattgagagtgctatgccattggactcacttactcagtttgcttttccttacctcgatcactcattagtcccaaaaaacagaggaagcctcaactatggattaacaccatgaacttgattagaataatgaactcttggcacatagttcaaacatagttcaagtgagcacattcttttttttttttccctgattaggtgatgttttaactgtctttgtagtgcatctgcttctctttccacttagcacccataccacatttgtggtagagtgacgatatatgctgttcaattgcatagctgcttctcctgggcagggctagggaaagtgaagggggagattaagttgcatgtggctagctcagttgttattaaacgctgcctgactgatgcctgatgtctgcagaggattttctttggaatttgatcaatggagtgctggacagtgaggacagcaaatggccattttatctcctgtctttaaaataaaatatgccctctctgaaggacagtctatgctggctctcaagtttaaatgtgaacggacagtgtgctccttacctttgaaggcagacacaagtttatcccattgatggtcatgatgctttgtggaaggaatcagcttttgttacgagctcaaaattcagccagaattatatctctgctggaggtttgatgggaagagccttttaatgtggtgcatgcatcatttcaatggctgtgagctcctggaattggaacctggtgccttgtctgtgcagaggtcagctggtgagtatgagctactctctttcctcagagaactgataccaattattttccattcaaatagaaatcatagttaagtttgagcaacacaagtatacaagaaggaaagattttaaaaacatcaatttctcatcagcttactactgaataagctagttataaagaggcaaagttaccactctgtgtaggaatgtctaatctgcctagctttcttaaaaggattatgtgctactatctcctatgggagcaatctgttccttaattaaggaaaagagaaataaaaatcacacactacgaatggacttgtgatgagtttattttgtttacaaatatttatactaattgtctgggatttcctgttttgtgatttgaatagtaagagccctcaatgagggctttttgagtgggttccttttccgaggtgagttgatttaagagccctgaaccttggccctcctgcccttgagagccatcccaaggaaagatacctggaaaaaattatttggcttctagtgtcctcatctataaaaacatggtgactctgcttctctgtcacacttaaagatattatgagaaaatgtaagcaaagtagtgtaattatgattcttaaagatgtggcaatcacagtgctttgtgcaatgcgtatgtcggtcaatctaacatctaacaaactatcacctggttcattaccttttctttatgagacaaagataaaaagagctgtcatacttgtttatagaaagtaaaagagtcttagagactaagactctgttaaccatccctaaatttttttttacttattaagttgaagtttaaaaaatgtgtaaaaatgtataattttcctggcattagaaaacaacataatgaaattaataactgtttgattttacaagagagtctatattgagctcattaaaagccaatgaaataaaaggttttttttgacaacaggaactcctcactttcttctctatctgtgctgatgatttttcactttcttaatgaggtttctagaagaggagaggatattttgatagtgtatcagcagattctaaaggggcagtggaaaggtcttgtgccagaagaagctggagtcaccctcacaacaggaaaaccattgcaggaggcttagccacatttccttgggactcatgctattaagctaaatggacatccaccaatcaagtaagacttgcttgttgcgaacatttttttaaaagtagaaggaaagaaaatgccagatggcattcagaacaccctgtgctctagtcttgctgctttccctgaaccaccttctttcctaatgactgctttgacaccacaacagctgattctccagagtacttcagaggacaaaatgtttgaggtatgctatgtcaagtggtagacggtgactcccctggccaaggagatagaagaatcctccccacatccacacattatctttgcagaaagcctgaatgactatgtgtatttctctgtaaatatgtaaaaggtttttcagacaagggagtttgaagggcttagatactaatgaagctgatttgtttttatttttgtttttttggaacatgaattttcagctgttcagatcagagaaagctaatgctccccatatatgataaaaactgctcccttctctcccttcctctaccctctgtaagttgactgaccatcatatcaacaatacaacactgatccatgccatggtgattactgttttctttgactttcgaatcagattaagtgctaggttctctgtactactgtggaatgcattttgcttgcttatgggatattttattaatcttagtgctttcaactcagtttaggtaaaaggaaaaatgataaattatgttatataaactataacatgtaccatccacattagtattttccctcctagaagagttgctctcttactatctttatgtagtgcaagaaatgagactttacgttcttcatttatggaagcagatatgtcataagggttaggatacaaaaacatatcattttctaggagagcatttttaatgttattttactcttttcctaacaatagcatatatgtagactcagattatattgttttactatcaatgattataatagtgaaaacccttctcctaaaatgcaacagttgtgtgtattgggaaggaacgtccatagtcctctatatacaatatagtggtatgattctgtctccagctaagaatgaataactaagaagtgagtgccatccttggcatcctattagacctcgataaaactatggcagtataggtaattggaatactatagagaacttcatcttcttgagttaacagcttgtatcctctttcctctttcattgagcctccctattgggtgtatatacagcaacattcagaaatactaatcctgctttacttcatcacattgcttttcaagtaaatttgcatttaacaaaagcctttgataattaataatgagtacctatgtgccctctttgagtgataaagagtggcttgggtggtgcctgctttcctctttcccattctctatccctgccttcctctccctcttttgagctccccgctctttctcccaggaaaacctcgctgagcccagattatattgtttgttcactgacagctcttttctatgcttaatgcagctccctaattcagcctcacgtggatctgtaaatggtacagtgaggacccggctacttctagcccttcccagacctgctcacccctgtattgccacggcagtggcaagtaactccaactgtgctcctcttctcccaaaacagcaacgtcgattctttactttaaatgaaccttggagaaggaaagggctgtgagatgaaaaaggcaggaattcatgtcatgtgctacagcagagcagccgtagcaacggcagtaacagcagtagcacggcagcagcagcagcagcagcagcagagtcctttagcgagactgcaccattttcttctcaccctgcatagaggtgtggttggaagcagcaataaactacccaccccctagcagtttcacagaggtggcctcttcctggctccagtcagaagacacagtctgtctggaggagtccccaaagactgttccaattggtgatgtgtgtctaaggatggctttttcaactagtaggatgcttctctgcacttgcagccacccaactgctgaagagctggaagtctagtgctccgccttcccccgggaccatttctgagtgtgggtgcacacctatgcctgtgtgcgtgcaggtgtgtgctgctggaggtctcggtttgggaccttagttcattgtagtgagttgtgggtgctgcagaggctggagcaagattatgacctagctcgggggcggagtggattatcttgtgagtgttctggctgccagccattgccctggtggggaaaatcacatctccatagagctctgaaatcacctggattgctggggagtggaaactgatcctctgctactgcttctgctgatttcctctgcaaaatggctcacgctgctgcttctattaaaaaagttcgagaggctgatctggatgaaaaggaaaaaaatcttgagagagacagaaaaaaacaacggaaaatccccagagaacgtatggaacgaaaaagaaaggtatgaggagcatccttttaaccctctttctctgcagctctgtgtagcaccatcagcctcagaactggcaacttcatcctcccttccttccatcattcccctgcaccatttctaagctcagtttgcagcctagagctcatgcctacatttgctgcattgggaggagatgcttgagcagggtgaatttcctttgctttgaccaagcaaggcaaaaatgcctccacttcatttttctttttttttgtctcaattatctttatttaatctcaaagctaggtgctttatctcttcaggctactcttagtactgggcacagaagaaggaaggggttgatttacggttggagggttaaagtattttcttcttcttgttcctcatctctattactctatctttagcagtgtgtcttctcactgactgtatatttgatgtagacctctagttaagaataaactaaagattttatgtgctctctttttccctcctggaggtttacacccggttttcacttcttagtgaagctgcactaagaatattggtgcagtgagctgtgtctctgcatttttaaaattttaattaatttttttgttttctatcattaatcctttaattttcttttctgaatatggcaatgaaatcaaaacaaccaaggttaaacaagggatgaaatgttgattccttttacattgaactattgtttctttctcttaaaatattgttttcctttataatagaaataatcttacaacttgatggaactgaaatactcatttagtcagtgatctagatctataaagaaagacctctgtaaatgttttaattaacaaagtaggtcactgaataatttcagaagatgataaatggcttattacattagcagagcattaaaatagtggtttgtacacaagctgttgttaaacatagctctgggattagggatgcaatggggatccatatacttaataatccatatgctcaatggactctttttttcttccataatagatatgtttacctttcaatttgggggatgttgtctttgcctcacttttggaaagacacttgagaaccaacattgagttgagatcttactgcatagggattcattgcatttcagtttactacttatctcaccaccaactagatcaaatgactgttactaggctacagaaataaaattagcagtatataatgatttcccttctggggaaaactttcatactgcttgtctgacctttaaaaggccgtgttgtttcaagattgcattaattcttttttttagtatcaaaagtattattagccattttgtggaggtcgacttccttcttgacagcgactgcagttctgtttctaatgctctaaatggaacattattgtataaagaattttctgtgattatatcttttttatcttttgttctccaaaacacagtatatgatttcttggctagcggcccttgtcagcattcagctgtgacctagcaactttgcttagctagagtaccatgcatacacctggaaaatcacttgttctcactctggtttgtttctgtatctagttgaatgtttttccctttccaaaccttgataaaaacagaaaaactgaaaaactgtactgttaaaataaaaggtgccagttgttgttgagaatctcagttgcttggatgcttcattgctttagcttgaatccagaaccataggcaagattattggttagtaatgtggtcatatgacaggatcatctggtcttcacatgtagatattatatctaagctagaaccagagtaaattaggaaaataaaggcatagctagtatttgtccttgttcctcttttttcatgtgcacctattgctcctcctcccttttctactgcagatatttacacagcacaacaaacttgctaaaagagtgggtgtgctttttagctatattatatttattttctagatagacagtccctcccccaaccccaccacacacacataagcactgaaccagttttcaattttcttttgaaaaaaagaaatttacctcatcatcataccttaaggtgtacatcataccttaaggtgtacataccttcatgatagttcatgaagaaatgaaaaaaaaatggtagcctattagtggcattctggaataccatctgcagaaagtaattttaaaattatcatcgtttatttgctgatgccactttatcatcataagggaaagcatcagttgtagagatgattgagtatatcattttcatatccatttgtagtgcctcttactaatgaaactgtttatttgaaaaattcagatgagatccaccccaatgcagataaaagccaattatggggcttgaaagaaaataaataagctgattttgaaggatttttaccaaggtaaagatattgcacattaaaatcaattaagcagtcacatttaatctttattttaatattcttttgtaaacttactgttaattaaaagaatatttgtattattattttgtactccttaaaacatttaaaattaattttaattatttgtaaacttgaaacatgttgcatacttgactataacccctctaccaagttgccagtggtgttgtattaaaacaatatatactaagagatctactttcaacctcattataagcagaacttatcttactataatatgttcagatttctttgggctatactctggttagctaatatttaaatatggtatagtaccgaatatctattgtatgtgtcatactatgtagagctaaaataaaactaagctttaaacaaataggcaaagattaagatgagttaaactaatttagtatgtttgctgaagagttcattaatctggaattttacaaaaatcagaatatctctattctaattattagcttatattagcaagtaatttctttgtatgtccagattttgccagtttttatgttggaatctgagaattttagaattgaggaggatgccaacaaaaaatggttaagtgatttatcagcgttttcacaaatttgcgagacttagttctaaaaagtgatttgaagttgaatattctttccacaactagatactatttcccaactgtacgttttttaaaatttgaaaaatacataatttttagagaatgagtaaacaaatttattcttgaaagtaaaacatatatttattttatttattttaaaactttattataagttcaggggtacatgttcaggatgtgcaggtttgttacacaggtaaatgtgtatcatgggggtttgctgtgcagattatttcatcacccaggtgttaagcctggtaccaattggtgatttttcctgatcctgtccctcctcccaacctgcatcctccaataagccccagtgtgttgttcccctcaatgtgtccatgtgttctcatcatttagttcacacttataagtaagaacataaagtatatatttaaataatatttatcacttaaattcaggatcaccataaattttcaaataaatcaatatgttcaccatttctcagcacagacaaactattgtccaatcaatcataatgtctacaatactcactggaatcatatgacttaaaaggcaaatgtatgactagttcttaacatcctgatgcttaaaacattctttttattattttaatttatactattaaaatgccagagttcacattttctgaaaaaatatttgtgatcatttattaagtacccatgtggtcatgtatctgacactttacacacatcgtgctgttaaccatgataacaatcctatatattaggtattattctctggatttcacaaacaaggaaattgcttaatcacacacaagtagcatgtggcagagttgggatttgaatccaggtctgtctggctctaaagttcattggagaaaaaaagtaatattatttcttggtcttgtacctacactgggtgtagattataaggaaatcacttattccaccaatgcttcaatttcttcacttctaaattaccttcctacagctgaaagaaatttaaatactgtgatagtaaattaaatgatgaatttgagggggaaattatgtaaattcgtgttgggattctatcaaaattgcaccaaaatatttcatgagatttcttggaaaatcaactattagaagtcaacatttgctcttcaaattgaggtcaattactggcaattatagactatgatatataatcattttttgtcacaattttattaggacttcaagatgtatttgcaaatctacttttattaaactgataggtgattttgcatgggattaagtagaaaattaaaaaaaagcctccttttgagttgttttcatttaatttcacagtaaaaggttctgattagttatttgcttttaaaaatgtacacagttattatcttggtgagaacaagacttatttctaggataggctttggggaaatctccccccccaccacattcttcttgttcatttgcttatttaattgatagcaatgataatacttattgagtatatataataaagttctcatcaagttgtaacgggacatggagcaatgaagatttttagaagttatattagtattttttcttaatttaaagtgttttatttgcaagttgagagtggaatgtattctataactttggaattgtgttataagaatgagttgaaagtgaattgtgttataagaatgagttgaaagtgtgttataagaatgagttgaaagttgtgttataagaatgagttgaaagtgaaacatagtgtaaaactgagcatgctttccctggtggtctgtgggtaaagactgcagtgtaggaggagattggacagcctagtcatccctctcatttttgagccttctgcttgggcactcagcagcctgtttctgaagggaagtccaactacggaagttgcaacacttagtcaagaaccatgtatgcacaaagatgtctggacaccaaaccaaatacactgtgattaaaaatacaagtcacagccagaataacatggcactgtataatgtgttacattctagaactctacaaacatgggaaatctgagtcaacagtttttaaaacctgcatggaattgtctttatgttaacttcccagaaccccttcatcagtatgtcagtatttccagaaaccacattaacataaagttgattggtgctgtcttgagttttatctggacagatgctcttcttatgtcttagtgtctacttatatgtgaaaattcaaaagttttattggtttgctcttcccattttgagtctaaataaaaatgttcagccatatctatttaaatgtggtagtttccatagaatcattattattatttaaaacccattatctttttctttatcactcctctgatttctcttcttagctcagttcacaaatcctttcttggctagaatcattatctttaaataaatgacttgcattattaatgacactcttcaccagcaccataaagctgagtttttattataaataaatttatatatttattaattataaagaacttcttttgaccattgcatgggtgactaatagcttaggtttacagctgtcaaatttgtgcaattgtggcaaaaatagtcccaattgtatggcttgaggtaagttttaagaagacagttgaaagaaaaagaaaattttaattgaaaaaagctactatgagggattgacttatttttggaatctaaaatcttatacacactcaatgtaatttttttcctattttattacattaatctgtgtttatataaatgttttaatctttaaaaaatcagaattaattctttcgttacctttattatcaaacttaattttattagtccccttattcaccaattgattaaaaataatgatatttacactatattttgacatcatcatgaatacagaaaatattttatagaaagatttaagagtcagtgaaagtacaagcaagttaagacttctactcatgccatatttaatgatctacttgtgtttatatttttccattatgccactcttttttatttgtatttctcaaaataatttcttctttacaatagtctcagtcacagagacattatatactaaaataaagtgtaaagaagacttttctcaaattctggatttctgcataaattgctagtgaagtcatcagctatttgagtgtgacccttttgctccaaaggtgagctgtgattttaaatgtttattgtggaaagtctcaacagaatcatctggttctatcccattcataataagtcagaatcctggggtagactggaagggaaaagagaccataatccatatatttttaaagctcccttggtgattccaaccagggttggaaatgactagaataaacatttccattcccccaccaacccctactctactccatcttgaaatttcaagcgatcgtagatttacttctaataatcagtatgactctaattttttcatgtgtagataggagacaccctggcaactttctgaaagtttaataagactaattggtttatgtaataaccaattaattctgagcacagaaaggaggaaacaagtgtttaagagataagttgcaagacttcatgatctgcagtttgactaactttgccctaatggaataatcttcaggaaataaggttgtgtgtaaatgacttttatgtaactaagctcaaacaggtggagaagttatccaagctaagtttttaaaggaagaccactacattgtgaatttaaaattatgtcttaaacacgttatgctgttttgaaagaactcaagttagtgtcctagggatttaattggtagcttagcagccttggaggcctcaaacctttggagaggtcagcacttctaggactcctaacacaagtcaacaactaccttttgtgttttgtacttgactttgatagatcttttcaaaattatgtaatatgacattaatttagtaagaaagaaggaataagtaattcatagatgagttatctcccctaattcttcagatattctctttcaatactcctaactcttcaacttctcacagtgccaggatcttttgtttggttggttggtcagttgttctgtttctgtttttgtttttttcatgaaactgctctctcactgtctttctggttcaccacagtttccagagcagtcagaaagggattccttactcagttgtacaggattctgaaatgtactttttagcatgtacagttggaattccttcttccatgttcctttacttcattagcaactttgccagggaaaactcttttttctctcattagagtttcatttatatccaacttagcctttttctagagaaattatttcattgtatatcattattatgttgcttatcataggggaacacctcaacagaaaacaatgtaagtagtattaaggaagagaatatgtgggctgggtgtggtggctcatgtctgtaatcccagcactttgggaggctgagacgtgaggagagcttgaagccaggagttgaagaccaggccaggcagcatagagagatccccatctcttttaaaaaaaaatcagagatatgacaatcattataaacatgtatcttaatctaatcaatttatttggttaagactaatggtgttatttcacattaacctatatttcttggctttttatatatttttgcatagagacttattaattaccaattttaactcacttgtttatagtttgtctgtaaaaaaagccttcaattaagactgaaaatgacctctctttgtgtatttgaatgtaattaatgatggtttttccaaaagtctattttttagcgaaaaaacttaatctctatgttattttttcataaataaataatgttaacctcacaaacatgaattctaataatctactttacttttattattataaagatcaaatatgatttttgcgtttgaaacaaagtttagccgataaccctttcaagacattcagcaggataagaggtggatgtgaaatctaagattataaaaaacaggcaacataccagaaagctgtttactaagttaataaagtatatttatacaaaattaccagatacttctaaagctccataaaaacaaattcaggagacctctgcttaattctgtctactcactacaaccttgggtaaacaaatgacctcagtttttgcatctataaaatgataaggatctgagatctgttagaattcttcctgtctttatgcttctgtgtcattttaattgtttctttgcttccctttattattataaatgattaagacagttggtagaatttccaggtttttcttcatttaagataaattttttttgagctgacactatgtcgtagacagagtacctttacccaaggagctcatagacctccttgggtgataggaacttttcacagataataagaatgaaatgttagttgtgccactatgttagaattgagattgtctatttttgtttatatgacgcaagttttctttaataggtgttacctgggagatgaaataatggaaggaaatagttcctgttgtggtgcatgaaattttatggaagttattaagactgggtatatacaaaatgaagtaatcatataaagctctatggttgttttgtatttcagatactgatttgagccattttgaaggaagaaatttattgtggttccctgagaaccacagttgatttctcctgaagtttattctcacttttcttttaggtactctgtacactgataataccaggagttagaaattcacagagaaatatcatcattgtttaattaatcattttacaaagatctgatggcagtaatgatagctgcctttaaattgcagggtgctgtaataaacaaaagtccacagtaaacgcttaaacctcagcaattcacaaacctttcaattgtacagcttagtgaaaataaatctcctgagttcttctacaggtagtagtacaaacttccttatttatggctcctgcctcaaactgggccagaatgcttaattaaaccatgtcacatcctaaaatgactgaaaccaataaaatgtaagtggaacaggttacctggaaacagtaacttctttgaggacagaggttacttaggaaatgagctttcgttcagggtggtcacctacaaaacatggggcttcactgtgggctccgagggacaggaatcaaagcctgggtgtgggtgggagagagaaaagccatctgtgaaatcacacgtttccattactggggagaagggagacaacaaaggacccagtagcagatgccaattctctgactacaaacacattatcgaatataagggcccttgtatataacatcaagcactcatactcagtctttcaacacaagggacaatattttagaactttcagctttcatactagaaaagagaaccaaaatataaaataagactttgtaatatgctaatatgacaaatattttgccattgaaggaaacttgatgattaagactaattcccattaatcactgtaattggccttcacatgagggccttctgggttatgtattctttagtaagttgtataagagcatctgaaacaatttagtcactccaatgatctttaaaagtttgtaaaactttatttttgatcaagaaattcagagaatgatgcttcttagttttaatcacattttcacttacaatcaaacagaagctcttttaaattatgcttgttttatttatcttctttcatgtcttagaaaaacatttgccatgcttcacttttccatcaagcatcctccctatttccaaagtcggttcagatgtatataatatatataattcagggtattgcagtcccttggatggaagaattatttgttgaataactgctatgagccaaattttaaattgagagataaagattatttactgagtaaaaaaatattttctctcaagtaacttcccttttagatagatatttaaggtcaatggcaatggaaaaattagagtacagagctagattaggtatcataacttttaaattttctttctttttttgtttttttttttaatacatagtagatgtgtatatttacagggtacatgagatgtttttatacaggcatgtaatatgaaatagctggttgcttttaagagagattgtggacttgaggataggtaggtggtagggttggcttaggtggagagggtacctcagaggttgaacatagaagctggtgaacagcttggcatgatcaaagtggaaggaaggggttggaaataaagttggagcacttacagagcaaagaagtagctgaactcagtgaagcaaaaaataagcaggtatggaaggttcctgtgatgaagaaagactatgagggggaagtgaagtgtcaaggtcacccagaagactgttatggtaatccaagagagatgaacagggcttggattggaatggtcataccagaagagcagcagggaggaaaacaggatggttatcagcactcaactaggaataaagaaaaaagagaagagtgaataaaaataactttaaagttatatatttcaatgatattaaaaaatgcttgtcatcaacagaaatacaaatttcatgtgcaagtcagaaggaaagtaaaaacacattgctttatatgtggtaagtttgaagtggtggcaggatgatgtttattttcattaattgcagagactttatatgtaaaaagccaataaataaaaatgtgatctttctctttgggtatagtaggaagagaatgaagtttagagtttggagtccttaattcaaatcttagctctaccaaattctggatgtctgatccctggcctcagttgtctcatctgtaaactgagttaataatgataattatttttaaatgcacacgtatacgaaacagagtaattctaaggattaaaatgaaatgatgcttttgaaagcacttatgtgcatagtaatattacttattatatcaccatagtccccctttttatgtgagaggacaaaaggaaatatgcttagtaaaatgattaaaaatgtccatgaaaatatcatatgaactcgttgttatttatttattttttttatgagacgaagtctcactctgtcaccagggctggagtgcagtggcgcgatctcggctcactgcaacctctggctcctgggttaaagcgattctcctgccttagcctcccgagtagctgggattacaggcacctgccactacgcccagctaattttttgtatttttagtagagatggggtttcaccgtattggccaggctggtctggaactcctgaccttgtgattcgtccacctcggcttcccaaagtgctgggattacaggcgtgagccaccggaactcgttgtttttaatatatacacagatagatataaaaacaaatacgtagagttgtacgttgtgtgtatacagacatgtatttcctacctcccttcacttagagggcctagaagcaaggatacttcagtagcaatgagcaaacctagcctgcatcttggtttccaaacataattttccaacagaagaaaatataacttcttgggaaaatggctgatttgagtaagaacaggctcggaaaatgatggggcatatcaacctgaagcagctcccaatgactgaatacacagaaatctgagcaacaaaataactaataaaaacaaataataactcatagaataaaagaaatagcccggggtctttactaatagaaataaataattgaataaacaagtaaataagtggaggagaagggacagatttttttatagtagaattccagtgaacaaatctagaagaaatatggaaattataactagtacaaaggcaatcagcaatctagcttgtgtttaactatcaaaaattgtattagcaaattgttttcaactatagaattctgtaaaaattaacccattgtgtttaagtcatcatagagggaaaaagttgagacacaattgctttgtataacttggaatgacttttgctggctattgaactcccagatgtatttagaaaaaaagattatgttatgaaattgccatttttaggtgtttattctaaagataaaatggaattacaagtgcaaaacagaatttttgtttgtttgttttaaacgtatgactgcaagttttacataaattattatttgagtaaatagcacatgcaaggagctgctatatagtacattaaatgatataaccaaaataccagaaaactattttgttcatagtaccatttttcaaatatctgaagttggtctttattaaccatatgtctgcatgatactgaacattgtacttttgagatatatgatattggcattgatgtaatgcatttcttattttactattttattcttgattcctctttgagtaaaataaacttaaaagacccttttttgaggtaatgagtggaagtagatttttaaaaatttgttggtgatattaactacatgatgttgaaaataacaattacaactgacattcattgaccactttctatctcccttctgttttgtgaaattataactttatttagtttgaattacttagataactgtctcttcttccacttctttttgcaactaagacatgccataaatctgtgcaggtatctgtataatatgctgtttctgtttcagtgttaataatttataactgagacctatttccactttgaactagggttcagtaggatgaaaactaactttgtcttttatttatcacacttgattgtctaataatttccataagcagcagttgctctccacatacagatagaaccctacacctaacgaatctctcccttggtccctcctaaaaaggcactccatttctcattttcattaactttgctacagcatggccaaactcagtaaaatttttttttctgttttctttgtctttaatattgtctttaatatttcacctgtctgtttcaatttatcttggtaaaatatttagatatataatatctgttcacttttgaaactaaattttcagttttagtcaaatgtataatgatactgcaagttgagcaaactgtgatcaaagaccatgatagtacctgtattaatgttacatgcgtgttctttacatacctaagcagtatagtgacaactgagtgtgtttacctgggagaactttaggtattttccctaagcccatgtactttgaggttttaatgtgcaggatgagaacagcatccagccaggaacagcgtaatgccccgatgtcatgggatttgacaagcttgctctgcacctaataaccataggtttctatatcacatcatctttgcctaagacataatagatactctactgattctaaatatccaacactatttttgtgtcctaaacttaaacttcaaatttgtcacaagttaatctcctgaatcaaacctaggaagagaagtttccttaggcaacacatagattgtaccaatgcataaacagttatttgagaatgaaacagaaccagagctttgtgctattttcatttttataaattaacaaggaaattaaagatgttatgaaggatgagacaaaaaaatttctggaaaaatatttttgtcttcccttgtaccatttctatttaaatgttaatgcactgtgtttccatcttaaagtcaaacaaatgtttaaaaactgtaacagtttttaatgaatagttttattaactactaatcctcctgttttcaattcaaatttcctagtctttgtagagcttgaaactttcctctgggatgcatgaagtctactacttcaggctggcaatcctctctcataactcctatttgcactgttttcctttccccttcatctcaagccttgttcacactcagtgcctattggtggcatgtttagctgccctgaagcatagcctctgtaactttccttgttctctttcagtttgactttgatgaatgcaatgctcctgcaatgagaaaactgtacacaccagtgacccaggcatctgaattgtctgggaataggctgcattactgaaatttagggtctactccttgttagacatatcagtgttccaatgacttataaaacatttgatccctgatggctgtaggtttctcttgtttgaaagctgctaaaaagcctgcacatcattggaatgcaaaattaaaacaagaagtagaagtgtgaagctcatttagacttttaaaaactggtctaagtgattgtggcatgtcaaagtactttatacactcctaagtggagacaaacctgtgaaacagaacaccaaaggcacaattgtgttgcaacaagcagtatattgtaactgagtttaaagccccctaacattcctgcacactaaagcacagtagatttaaataggatctttgtgattccacatatcctaaagaagcagtttttctctgtgtgaaaccacatgcattttcatagaagattcagggataaaaacacatccgggcaagatataagagtgaaatgtatagacaaaaggattaagggctcaaaggcttttttcttctttttcccctttcctctttgagctgaattatcatttaatgccgtagactggataggtcaagagtttgactgaacagagtcataaagtcaactaggaaaatattttttaccatataaaagaaaaaatagaaaactattcagagatgtcacaagtatcagaccatatggtgtaatgccacttgattagaggtttattttttctaattagctcattttggagtagattatttgagaatactcatccttggaattgttatgatatgatgtatatgcacatatgtatatatgtggacatatttatctgtattctatatagatgtatttatcaaaatgcatttccgtttttatatgttttaataatgtctctcccttcacttttttctcctggagttttcaacatattgaagttacagtattgcagttttactatagtacatacttcaaatgtacttaagggaatgatcatttgaataaaatttgactaagggatagatccttttaataagtatgtgaaattgataggaaattttttagattaaaaagtactgaaatttaaggtatagaatcattccacagaactactttgtaccctggaactggaccccgtggcatgatggtagcttctcagccagacggagcccatgagatagatggctctgacaggaacatttgggatctgacattagatctgtgggtggggtgaagagaactgatctagagtagatcatactgggtcctacagggtatccaggcatgatatcacatagttgcttcatccacaatgtaggaaatagtcaacattggggttctcactccagcagggggatacagcaatggggaattccagcagccatctatacttgggaatcaaggaaaaaggggctgatcatttgttcttggccatcatgatactacctgctgatattgattatgggacaaagcttcagtattgggaaagaaaaatgttgtgatgattctaccttcggagctgtactattattatacttacaaacctcttcatggcagccctccagctggaaggatgcactagagttttggtcatccaggccaaattcagaagtaagagttaattctcttcactgacaccagcaagagaaaaatggagttatattttgagggcaacgtaattattggttgtttctagatatagttgaaagtataaggacttgttcctaaatggtaagataggagagcaggaacacttagttttctgaagatgacttcattatgagtcaacattagatggaagtcgaaaaaagtttgaccttttattctgaaattaaaggtgaatggagacagcaggtgagatgtatcaagggtcccaggcatgagaaactgatccagagaagaatgagagcatgtagactctatactcgactttttacaattgtttattatattatttaattctcacaatggggtagatattctaaatctcattttttaggggaagaaaattatgcttgaatattttgcttgaaaaagattttcccctcaaatttcatggcaaataaataccttaagtgacagaccccagatgccagattccaaatcccatgccttttcgctaaaccatgctatactaccacgtaatgtctgatttgtagtatttttaacttaaattttagggcagataataaacaaaccttagacccatctgattcaaaaagagaaaaaaataatggagttgaggaaaaataatcatagttagcttgctgtgcaatgctatatactggacactgtcctaagtacttaagatgcactgacttatttaatcttttcagcaacaccatgaggtagaaatgattataactcccttttgtccaatggaaaaagtgaggtttaagaaggaaggaagaggtaagaccccagatgacttgaatctgtgcttctccaactgaccttataatgctataaagaagagtagctgggatgaaaaatatatatcaccaagttacacaaaaatatttctaacctttcaaggaacagacaaacaaaatagcagggggagtctctgaagaattatgatgtgatttacactacagcaaggtccctaataataagattacaggaagaaggacagaagagctagagttatcaagtgctgaaaccatctatactactagcacctccaatgatcaaaatagcatcaaggccgatttctaagtcttggatgtcatcaacaggaatctcttgttagagtagaagagaggtgaggtaggttctggcccaaagtatcatatgactggctagtttggagttagtttattaaactgcaatggaagtagctctaaaatttcctgaaagttgtcttttttttttttttttttttttttctcactgcaaccacagagagaacccaaggacaaaattcaaagtaaaatgaaaaaggagggctactgaggtattactcacaacaaatacgaaaagttggggagtgcatagagatctctgaatgcctcttgtgctctgctgaacaatgaggccaaggatctggaagacatctttataccataggaaaattgatccccccttatcttagtatggaataataataaactgaactatgttctccttgttccagagcaaggacaaaaaaactaccttctaccttatcagagatgtttttttaacacttgatctccaggtcagctaaaatcaaatgttattaaaatagaaaaggcatatttcagtaaaattgacattttaaaatgtcagtggttaatgaaagccatagtctcttttattgataattctttttttaggaagaatttaggacaaaattaaactgtcatgacatacttcttggtctactaaatattatatgacctttgtatttagtaaaacttgacaaaatcagattagaactttgccatgtagtttaagttatcaaaatatgaagtcagatcaattttatgaccatagaaacttaaaaattggaaattctaattttagacattagaagtggcatgactaaagttttatggtgtccatttcttcaggatgcacaattactacagttagcatatatctgaattactgatgtttcacagtggcaaagaatggagagctccacctgggtatttgaatgggttgttggtcatgaacacaagtagaaaatgcacatctttctgtgagtatttattgtaggctgataactgtggggtgtttttgcatttacaagatgccatattattggtggctgttgtctctaaaaggttagcatttgctttgaaggtaagacatgttagaagtaaagatacctatgaaaaataaagaaaaactgtggagagaggagcagcaagtgagtgtcatagattaaaggtaattaaagtaaagtgatggccacacagaggtgacagctgtaaggaggattagatatcacggtcaggcagggatctagtgatggatccatcactggaaaaggggaaccaataatgaaagaatgcagagaagctctacaggtggaaagagtggaatgaaaggagcttttcactacatgtaataccgtagaggcaaatgatggccaaaccatagagctgtgtgtgtctctctgtgtgtgtgtgtgtgtgtgtgtgtagacatttatgataagagtaatccttctggacctctagagaacaataattatatttccctgacattagcaatgattactctccatatgtttatagtgacactgatggatatcctgaaatatccatgatgtgatcaacagtcttactcttacctcatgaaccatcttgtggttcatggctactgatgcttttgtggccattggcatttttgttcttttcattcctcctcatgttcagatggccaccaacagatttggtgcctggaccaaaatcaaacatctgaaaatataattatacaagaactgacagaatagtaatgtgaccaaaacaaaatcatttttaatggtaattggataaatgactgcagattgctattctcggagattcattaaagcatttctgtgagtacatcagtaataatatgcatttgtctctttttatttaaatgttgtgtttgggcctgcgtatagtgctgaatgaatatttgtgagaagaatgaaataaatgtttgcataaaccactcatattttaagtatgtgaaggaagttttttttattgctcatttagtcagtaatcaattatgagtgcctgctatataggggcactatcaggagtactagggacaaacagacaaataaaatacagtgtctgttcataaaaagacaattaaaatacagggtaacaatcatcctgatggctctgtgtccacagcaggctcctaatcttgttggccaggcagggcttccaagaggagtcttgcagatgctgagagggagggaggtgatccaggggaatagttattaataaaagtccagaggaaatttcaagggagagaatgcaaagatgagattatgaaaactggaatacgctaggaatggtggttcgcacctgtaatcccagcacttgggaggaatgcttgagtccaggagtttgagaccatcctgggcaacatggcgaaaccctgtctctaccaaaaatacaaaaattagccaggtgtggtggtgcatgcttgtaatcccagctacttgggaggctgaggtggtagaatcgcttgagccgggggaggtggaggttgcaatgagcgccactgcactccagcttgggtggcagagccagaccctgtctcaaaacaaacaaataaacaaaaagcaaaaactggggaaagaaagatcagctcagataggagtccataccacattattaaggattttggctttttttttttttttgagacagtttcattctgtcacccaggctggagtgcagcagtacaatctcggcttactgcaacctccgcctcccgggttcaagtggattctcctgcctcagcctcttgagtagctggaattacaggtgcgtgccaccaggcctagctaatttttgtatttttagtagagacgaggtttcaccatgctggccaagctggtctcaaactcctgacctcaagtgatccacccgccttggcctctcaaagtgctgagattacaggctggccaggctggtctcaaactcctgacctcaggtgatccacccaccttggccccccaaagtgctgggattacatgtgtgagccactgcgcccgacctagattttcgcttttatcttgaagattatagggagttccttgaataggtctgagctttggaaagatctccttggctaaggcgcatgacaaatggattgaaacagagcaaagctagaaccagtaaactctttaggagacagttacagtaattcagtcaagaaataaatcactgacctaaaatagtggcaaagggatggaaaaaagtagactctgcaggactggatgtatgggaaaggtaatgtcaaacacttcaagattgtcagcttgggcagcaaggtgtatagggctgctggtcactgagccagagaagactgggccaggagcaggtttgagtagggcattggcttaggaaagcactgagcatgtttaaatactaaggaactggtagaaaaggaaaacattttttcttaaaaatattacttaataattgctcttaaagaagaaaacccttaatttttagagatatatctgcattttaaatcatatttatattcctttcttcttcctctttccttcttccttcttccttcctttcttatcttctggtagagaagattaattttatgtggacctaagtgtgatttataaacttctgactgtaaagattaaacacatataaacatcagcatgagtgtatttactatagcttatcattatacagatgacagcaccaaagttcaaaatgacagctgatagtgtccatctagaatttatttctagcagcatgtagctaatagcaatggagcttagaggacataagaccacattaacataattttcgaagaatgaaataacagcattgactttctaatatatttatgactgtatttctggagtttttgattgcttataaagtgattttgttttccaaacaaaagtagggcaagattgaaaacttgaaaataattctcccattttccagagagaacaaatgatacatattcagggtatttatttcagtatgaataatatatgaaggatcataaataattctttataccttgaagtgtatagatacatttactctaaagagatcctgaaataaaacccaagtgaatgaagttggacaatgaaattcaagttctttttggagctctaagttttccgtctttgaaataaaatgaatttagtctatgtatcattccataattgtagtgcaactgttcttgactaaatgcacactcatcatgctgtttaaagtaatcataataccatattttacagtaactctctgatgtcggtgcaacacaactggaagagcctagttgattctgtgtttcaacacagtacaagaaaatcagttatcctcataataaatcaggtttaattggtaattctaaaataaatactcatatatgctctagttgaaccagcatcagatatttagtttgaacttaggtttgttattgactgatgaatgcctggctgctgcctggaagtgtattttcaatgtctatgtctcttgcttaatttcaaatgtcatatgtgtgtattttgtagggaaagtaggattttaaaatattttgaaatcaatagattaaaatatttgagtataggattacacagaactgagctctgtgttacagttgaagaaatcttttggtaatgacaaatgtatcaaaacatttaaatccatgtgttgaagcccaaaaaagtttatgaagggttgttatttctctagaacctctagggtgagtatacaaactgaacatataaatatatgtagcttaatgcctgtgaactttcaaaggaaaacactggccaaatgctaatagaaataagtagtaggaaaggataaatgaatatttattttctacccttagtcatgaatagttcactggatctttgtgaactttgaatttgcttaatagtaagacattatttggggaggttgattataaatgatcattagtacaatactcccatttttcttgtctagatgctcaagcagtgtgtctaactaccatggcatgtgagtcctctttgatagatagataggtctggacaaccatggcgtgcaacatatagaacctagccaggcagctttctctccagcctaccatgaacagtcacacctcttctaagattgttgttcctgtgggcaccaaactttgcccattaactgatctattctcatgctatgcatcatttattttaaaatcaccttaactgagtacttttcagattatctcgatcagctggttgccagatggaaacttactacaagtgtttataaattatactctggcttaggcttcaaaaaatagctattacagccagattataatgaagcccccatcttgcttttttattttaatcacttgaccctctcttcaaaaaagctgtggggaagcccctgctttagtagttcatcagtttggggggattctgtacacacatatttgtcttcaaaataagtaggagtgcacagtgactaaattgttttattcacattgcatttcaaaatccagtccgatgtgatagaacatagaattagtcaaatggccctttaggcttgctttggccaccctacacttctgtcctcatagtctctttaatgtcagtcagcgacatttattgagtgcccactttgtgttgggcattgcgtggagtagccttcggaaagctatgcaagctgttagcactgtttattaaagaatgttgtcctttatgtaccagaagtcaagaggcagcagtgtggaatgaaaataatagctggaaggaatgtaaaattaaattggttaattgatgtttgtgggcacatgaatagcttggcaatattcattttgattaatctgtgtaaagcataaacagtaaaagtcatttatattgacctcaattagaaaaattatgccacaagtccatatagggaatttagtgtagatccataagttatgcaacagtttccctgattgatcagttataaacagggccaatttgtaaaaatcatgatgtgtttaacttttagtcaaataaattgtattgaatgtacccaaacacggaagaaaatagcatgctgccttgcttattgcacagaatgttccaattttctttccacaggtcagtaattcccaaagacaggagaacttgtccttggattcatgtgactatgtcggcatcgagaattctgcatgcaatagggataaccaaagattaatttaattagataaacgcatttgagtgaaacaatcggtcttgaattatagctgccatgatcaaaaacaaggagaagggcagacagtaatcgaagcagatttctaaattcagcaaaggtaacatagatcttacatattaatgatgatctgaaaaatataaagtattgactaaatatcacgttaggatagtttttttgcacatgatagtttagtttaagagaaactctacatgacctttttaaatttgtgtgatgttcttgaataatccttggatcttggaggagagaaaaaaatttaattcaatgactctgagtgaaacattctgatttgccactttaaagactcatggcaatttttttttcagtctttttaatatgatagcactagccctttaagaataaattaatcggccgggcccagtggctcacacttgtaaccctagcactttgggaggccgaggcaggtgtatcacttgaggtcaggagttcaagaccagcctaaccaacatggtgaaaccctgtctctactaaaaacacaaaattagccaggcgtggtggtgcacgcctgcagtccttgctacttgggaggctgaggcaggagaatcacttgaacccaggaggcggaggttgcaatgagccaaggttgcgccattgcactccagcctgggcgacaagagtgaaactccgtttaaaaaaaaaaaagcataaattaatcgaaacatttgaaggaaaataaaactagcttacacagttgatttgcaaagacttgtcttacaaagtcctataaagctgtcctgcaaagccagtttgggagagtaagaatgtttccaggcgacagttagtttacaattgtgacatgtaaaagatgtggcagggtgtaagtgaggctaatactcagcaaaggtggaataagagtgaaatggtcctcaccttgaaaaagagctcctggatattaacaaagagtctgtcatatgccacagtggtgttttcatcctccctgtgagtctgtcagggaaacactactgagcaaagccagcccagagagtgagaaaccatgtgattcctatcctttttttccccatgcaaatggactaaataggtgatcaccttcaactatggccttgtgttaggtgtgtgttcaaatgttacatattctgtgtcatagaagtgaaaaacttcagagctggaagggatccaacaaccatcgaatctaattttcttttttaaaaaacaggaaaatagaagctcagatttgataaaggttacaaaagtccacacagagaaattcatagtgggatcaaaacctgggattagtaaatcctaactaagaggtcttctcaaaacttcacttcaggagttgtgatctatccctttaggttaaattatagaactgagacagttatttcttctccaaggtgttagtttcctgatggttctgtaatcatgatttcttatttaaaaggtgaaatttaaaactgcagtgaatgatttttagatttgctgtcatagggacttcagcagcaactttcagaagattaaagctgagaggctagcctttgttctcagtccttaatcgcttttctcttatgatggatttgaaacacagcaatacaaatgaaataataacagtaaaagggcctgggaatttaagaagatattgcaaatatgtcacgtcatggaggctttgaatttcactttctaagtcatgtatcaaattcaagtaccctgctctaagtgtggtcaaacatgcaaatatttgctttctgagtaatttgccctaatgactttgaagcatttttgaaaaacagtggtgacattgttctgccctggcagaaagcatattccttgtcagatgtccacagagatcccgactgtctactggcagattattaaaggatggtgctgcattgtatttgctaagctttccttcagtttgacaaaatgttatgtatataggttgtcacatcacccaagcttctgtgccagacctgtctggcagccacccttggttaaccactggaagatagaactagaaacgttttaacttctgaaataaggtcctcttctacagaccccttacacttttattttttattagaaagtatctgatcgtcggcaaagtttgaagtgatcacacataggcagctgctcataggaaattctgttttcacagctatgatgttttccaggttccaggttggtaatttaaatctgttcagccagaaaataggaaatttcagccatcacagtagcaccaggtgtttgcatttgtctttccttggcctgtccctgtttggacactaagctttagcagtggggttcagggatcactacatggcatatttgggacagtgctaatcataggagtatggatattatattcaccaagcagaaagtttctttattggagaaagcatgagatgatttccccgagatgaagaaaaagaaagaggggggtagaagaaaacaaataactagttatttagggaaagtgtattccaacagttgtcagcatgttacttggttggttcatactctcagtggttttttcgttcttaacaaagcactgtaatttcttttctaggaaaatttaccccaaatggtgttaacctttttttcaaaggccaaaagggaggtttattgaaaatctggaaaagaaattaaatatttgtcacacttaaatatgtttaaaattattaaatctgtttctgttaatctgcaaaaaaaaaagacgtttaggtcagtgtagtccagttaaatattgatattatgaattgcgtccctatctgtggttgtcttttattcatttacctcacaaacatgtaatactagtgtgcatatttaggtatgggaggacattggtcagagaaaacaggtatatcttgtaaagagcgagagctgatagtagtcacaaccttattcaaaaagatattaacacaaaataagggactaatatcacaggtgtaatgaagacttgcaagagaaaggaaagctttaaaattaaaggcatggcggtggaatgggtattgtattaatgagacagaaagatgccaggaaacaattcgagctgttaaagcacagcaaaattattcatctagcacctaggggcatctcctgaatctgctgtggttaaatattccttttccatgtgtaagtacagagtttcagacctcagctccagaatgaagtgaggaggctagagataatttttaaggtttacaaccagtgttttaagtggacataattctattttgaagattctattgaatgtttttaaaatagtacactaattccaaaagtgtgcgtgggggagtgcatctctttcaatagctggaaaaatcttggttggcattctttgttttgggtttatattctgaataaaatagttcatatatgttcaagaagaagcacgtattataagactttgtggaccacagaccttctccaagttctaagaaccttatagaaggagacaaaaaagttaaaaccacatcttagtaaaagaatttataagtacaccattaaacatcatagcctacttaaatactacagaacatggttcaaatatgtggaaaatttgatgagaaactaccatattatgatgaatcgttagtctatataaaattattcaggaaacatgaaaggctttgcttgatgtatcccagccaacagtctaatcttgtcactgattttgaagcatcatctttctgaatgctttcacttaaaactttaacatttaaaaggtttagatttcatgttccttttaacatgaatggagaaatgagcccccttccattgttgtcataatatttttggttcagtcagtaatttgtaaaacatgattttaagagatgccttcacctatagctgggaagttaaagtaatttcactgaatactggcaatgcctctcagaaactggattgtaaggataggaactttataataagcaagatacttgaggctcataaacgctggaatgaagagttattcaaaaccagattgacaaaaaagcagcgtggggccctgtggaaagcaacaatacaaaaatgtccctcttggatttgagtgtttagggatttgtgaactcaaatctgagaaaggtatttcaggaatgttatttttaatttttttaaaaaaaataatggcaaatggtttttagctttaaaaaaaaatgacatattggaaaggaaaattctagtctatcaaatgtaatatggttagtttctaaatatcttccacatcctgttttccccaaataattgcttccaattcaatactttttttagacatttaatatttaatttatagcatgtggatggataatataaaatctaagtctggaccctgcattgagtagtttaaaatgatttgcaaaataagctgtatgtacatgcaaataacaaatgaggaaggataggactaatattcaaataattatatataataatatttatattaatatattttatatggtttttaaactatatactacttaaactatataatatataaaaatttatatataaatatatagttataaatatatatatatatagttttagaggaaaccctaatggaggaataaagcttaatccatattagtccctcacaaagctttgatttgatcataattagcttcatacagcatatctaatgtatatttgctatgctcatctcagtgggaaacaatttctttcaaaaacctgtaatatgatttcaaagattggatggtgttgaaagccatcttgattattgtttgtaaagctggggaaaacattttcaaaatactaaaaattaaaacgaattataaatgaatcaacatgtttgctctcatgtggcacaatcatgaataatgacaaactacacaattataaaaaccaaaacttctataccagtgtcaggtgagccatttgatggatgtgtttccattgaatattacatgttaaaagaacggtaaaaggatggctaattgttttctgtaacaataatgagaaagagtatacataaaccaagtagtttccacttggtggaagcaattacaaaaataatttttatctgttttgctgataaagcagattcattaaaatatttagtattgtgtgaataagagacagagaagagggaaatagaaagattcaaaggcattcattgagtaatgcaaaaattctcatatgtagagacattttacccagcaggaacttaagtccatgtgtgaggcaggctgcttgcatggtgaaaaacaaaacaacaccgccccctcccctgctctctgtctgcctcacccccctcactccattgacatgcatagctggcctggtaggtgtaaaaatagactggcagcgcctgcactggaaatggtcactgaatgcagcctgcagttgccgggggttttgagttctctctgacaccagcaagccagctagcagatggggagaactggtgaggggcgtggaagggaactgagcagaggagccaaggatcatcttgatgaattgcccacattagtgtacccctgggagccctggacagagtgcagagggcaaggacgggcccactgacagcaggaactgtagagctgagatggggaatgcagccctctgctcttcttgccatgcggataagagcataagagcacaaggaaacatgcaggaactggataaaaccccagactactatggctgtaacagtgaggacgtcaaagaacctggagtgtgggtaagttttaggccacaaaggaggaggaagggaggatggtggcataagaatcaacagtagacctcattggtcagacctctaaacttcctggaaggaagctgacagaataaagccaatgtgatcaaaccacctgactacctctgatcaagtggcatgcttttgcttcctcttcatgttatgcaatgccacatgtttgttttttctcggttgtctttaactctgagctgacatttgggaaagagcaatgacactgtctctttaatttggaattttgtccaaaggtggacatacgtattattatagagtgactttcagcaatattgcagagattcacttacgttcagtctgtcaaattctttcgcctatttattcatgtatagttcgtttctcactaagtcacagagcatttttttaagcatatgctcccttagtatcccagctccagcctaaaacagtatttccctctaatatttgactaacttcagtgaagaggtccttaaatgcttttcttgttatgatagtaatagtttgtaaaaaggcttaaacgttaagcaattaaataagatttatttttttaaatctttattaaaattttattttttaaaaacttcagattttaataattcataggcatgatgtgttccttaaaatgggtacaaaggcttattgtgattttttttttttggccaggaatctctgaaatatttggattttcatatttgctggagaataaagtttatcttttatctgtcagatccaggaatttgaccaccttattgcaagttatttatttgcatgaaaataaatagctggttgcatggtttggctgcaactatgaaactaagatatgtaggatttctgagtaagagaggcagaggcgtttgtacttgttatgtacttgcctgatatttccaggagtgagaacagggtctgaagcataggaggtggtgctctgctctctttggcttttactctgacctgaaacaatgtcatcatttcttagcactgaaactctgtcagaccatagtgaaactaaaactaaaactaagaatttatcaacaaaaacaacatgaagggcaaatatttgcagttggcagtgaacagaaagccctgtcgtgaaaaagaggacagtagttccagcatggaggtcaccgtagtcaaaaacgaagaaaaaaaaaggtggggagggaggccgtcccagggaagggagatcacccaccgttaacaaccgcacaggcgaggtttgtaaccaagagcagtaacgtttctcctggattatggtttccactacccacatccacccaggagagccgctctggacttctcagagcagtcacttctaatgcagctttctgaactgaggggacaaaaagtatcattactactagttcaggaccacaaaaatgagtgtatttttaaaaatgtacaatgtcatttctctgaattaattaatatagcctgttagtcatttaataaaatcttctgctaaaggttttatagactggagcatatcatgattggtgtgacattggaaaggtgtggtagaggtggaagtggacctgttttctaccttcagaaatgatattctgcccagaatttttccactttggccatggagaaaaagaaaaagttaatgtttaacttaataccaagcatgacttaagcaaaatatgtggttctaggtagtttaagttggactttatgtcttccaaatgagaatgtaagactcacaaacatatgtcagggttttcctctgaaatgagcttggcttttacgtaaatccttaaaggaccaaagatctgctcttatcacaattggcttggcagctccaaaaaagaggaagcatgcaggacaggacagagtgaagaacaaaactcagctgtttttaaatttttatttagtcctggtaatgcttctaaatttttaatcacagaggggaaaactgcgtcatctcattatttttccatgttcatgtatgcagatgactggtgggtgtattccaagttcacttgtgaaagaagcagctcttggagatgccttacagactttgccctggatcctagggtagctctgacacaagtcagcaaggccttgttagggtccaagtaggctccagagagaaggattcttgaccatgttttgataaagtgctatttagaacagcataaaaaatgtatctttattttatggtcttcttttggcttgtatttttgtgatgatatcatttataaatttgcatattggtctaagtatactctgtatttttcttgcattgagatcatgtatttctattgtggtttccttagcataacaaattaatttgctttgtcccaagagcaaaaccatagatgcgatgctttaatatagacattttttaggttacctaccctagctgattttcaagttatcacatccttcttttttttaccagtttactctcagagatttttattttattgcttcatttatttttaacaatttttcccaattgtagtagagattttcaggtttttcgtatgagctttttcattattctataaatgttcttattactttagaccatgagcatgaattctggtcttattatgaaaacaatacttttctgctagctgactcaaaaggtaataagtcaatcagcaaatgttcactgagctaggtatagttttgaatgctggcgatttaacgatgacaagacagagttcctgtgatagcgggagacagactttcagcatttatatggggggatgaggaagcatggtgcctaactgagagggaaatgtactgggaacgttcaagggacggaaggatggttagcatgactgaaatgtagtgatcaaagaagaggacggatggcaatgaggtatgagaagcaagcatgggcctaccttggcaaaagtttgatttctttctgaacataattgagtcttggaaaaggacttgagatttcattagaagcacagtgggaagcctctggagagctctacaccaggaaatggtagaacttcatttatgctttgagaaaaatctctctccctttctccccatctcttcctccctccatttccccctccctttccttggtgaaggatgagttgtgaatgcagcaagagaaaaagaagggagaccagtttaactggtttcaaggtttgcagccctgaagtgaacaaggatggaggattggattaggatgttaacaatggaggtgagattgtaatcagattgaggatgtatttttgtttttattgaaagatttttgggagattataaaagaaatagaggggtgtgtgtgtgagagaatgagtgagatgattccttatctatgaagcatatcagtatgtcaaaagagttgagttaaactttccttcagttttgaactctaaaagaatataaattagtttaaatggtatagtattgtcttccgtaaaagttttataaaagataaggaaattttgttcatatggttagttttgatattaaccctaacaagagccaaaagtgtaatggaaattactctggtaaagcatttcaaaaaatacaaaatgatttagatatggttatgtaacttttagatgatttatttaaagataaaggcctggcatggtggctcgcatctgtaatcccatcactttgggaggccgaggcaggcagatcactggagcccaggagttcaaaataagtctgggcatcatggcaggaccctgtttctacaaaaaaatacaaaaattagctgggtgtggtggcacacgcccatggtcccagctactcaggaggctgaggtgggaggatcacctgagcctggggaggtggaggctgcagtgaactttgatcgtaccactgcactccagcttgcgtgagagtgagaccctgcctcaaaaaaaaaaaaaaaaaaaaaaaaaagaaagattgaaagaagagaagacatgactttcattctctaggaacttacaatccagttttagaaacagggcttacccacatgtaatcaattaactataaaaggtagtagagaattcactggctgcacgagtgttgaaatgagccattataggatgcccaagaaggaggggatcagtgcaggcctcggtgctctgggaacacctcgtggacagagctaatacttagctgatatggtgcagatcagctgtaccacttgtttacagtttgaattgctttcacacaggctaattaagcagctgttactatgaacctaccaagctgccccttctgaggctagcagaaccccatcctcaggatttcccagcctactcccatcctctaaagaagcaaacaaaagaataatgcttggactctcaaggggcttccaggaccaccctcctctagtgctgtggccagtgtccattgggagtggttggtgcctgagctgaactagttgttaaatatttttaatatccatcctgccagtggagaaggtggagcctgaagcagatcttgggagcaaaatacaatctgggttcctgttgggaagaaagtacacttgtgccttcagtaagcatgtattcagccaggcatgggcctaccaagatgagtaggacatgcaaacttggcttgaaggagtgtaatccagggatggccaaagcaggactttgaatattgtgttcccatgtcctgagaaagcacaggggattatagagtacttcaggatgacaactcagcctcagagggtggcagaaaagttaagtcctgaagcattatgggaagttcacacactcagtattggactcattagaaagactggaaagcaatggctataataccatttctactggacatttgtggaacccccaaaatttagatgaggcacataggctaagattatcaagagattcataagtcaagatttagaatttgaactatatactagtgaaaggccattgaccaaaggctgttttaggagaatcaattaggttgtagtctgcatatcataagctctattttctttgaagttcctaccagctaataggtacttagtaaatatttgtgaaaaaaatgaatgaattaatgactaggaaatcacccaaagtagcaaatctatttatgggaattttcccactacaggtgacatgcccccagatgaaaccagaggccgccaacattgaaaaggtgatggaagcaaaaaaacacttctaaaaacagtaaagacgttggtaactaagaagttttaattataaccttctgctcaaaaaaggaatgtacccttactgcaattgcacacattacttgttgtcgtagttcatttgtgtagctacaaaagaatacccgaagctgggtaatttataaagaaaagaggtttatttggatcacagttctgcaagctgtacaagaagcattgcaccagcatctgcttttggtgagggcttcaggaagcttccactcacggaggaaagggtaggagagctggtgtgtacagaaaccagggggaggtgccaggctcttgttaatgatcagccatcaggggaactctcataggaactaatacagcaaaaactcactccttatcaccagaatggcactaagccattcatgagggtccaccctcatgatctaaacaccttttattaggctctgcctccaatattggggatcacatttcaacttgaggtttgcagagtcaaatatggaaaccacagcattggtataaaatatatgtataaaacatatttactatagaaagtagtagacattttcttgaattgttattctctatatcaagttgtacataaaatgcaatggttacattttaaagaaatttggtgaaggtaggctgggcaccatggctcacacctgtaatctcagcactttgggaggctgaggtgggaggatcacttaagcccaggagttcaagaccccctgggaaacatagtgaaaccccatctctacaaaaaaaaaaaaaaaaattactaggtgtgctggcacacatctgtaattccagctactggggggctgaggtgggaggatcacttgagcctaggaggtggagattgcagtgagccaagattacaccactgcactccagcctgggtgacagagcaagtctctgtctcaaaaaaaaaaaaagaaaaaaaaaaaaaaagaaaaaagaaggaaagaaagattacattgtaatgttaagcattatctatttattttttttataatgaggtatatccaaaccaagtatttgtatttacttgaactatgtaataacttttgaataatatctcttctgctatatttaataagattagttccactgtccctatagtggctttttcaaggtcgcctgtgtgatgatggagctgggaatactctggggagagagtcctcttttcagctgtattttgcttccttcccacacagacatctgctgtgcctcttactcacttttagttgctgttttggattttatgcccctttaatcaaaacttattatgccacaagatagattgacttgtttcctgaattctttatttttatttaagggtttctctgtgaaatcttaggcatattatatcacatttgattgtcaaaattttacgtgtttgatttttcaaagctgaccttcatatcatatttgtgtgggcttatgtgactatagtaaaacttttttgtgcctttctttaatacttccttataagaagtatacgtgtaattccagcaatttgggaggctgaggcaggaggatcacttgtgcccaggagtttgagatcaacctgggcaacacagggagattctgtctctatattaatttttttttaagtttgatggtgtgcacctgtggacccagctatttgggaggctgagctgggaggaactcttcaggccaggaaattgagggtacagtgagccttgattgtaccactgcactccagcctaggtgacagggcaagatgctgtctcaaaaaaaaatagtaaaaatcttacaatgattgacagaagtataataatttcaatggtggctttgagctaatgaattgtttcttaaagctatgtgaaagccagctgtgtaatagtagagattataaattgaaactgtgtttttgatgagtttaagtgttgctgacatacagtttatttaaatttcagtctttttttttttctgtactctttaccttcctcagtcatcaatgagttccaaaagggggctttgaagtaaatcatagattctgtttgatactgtaggaatttccatattctagtacagcaactctattaaataaacacattgtgtacttaaattggatctctcacaagtcacaaataatatattagaactagagctgaagtacctttatatttgctacttttgtgtcatacctttctagattattggctttctgaaggatattagaaagcatcttctaagatacctagtaaaacagaagtacatagaaaaatttgtgaaaatctttcctttttgaaaaccactggttgttacatatgaacttttccccagagttacaaaagaaaaagagtatttttcaggaataaaagacatttaacaattttatattagtaaggtatatatttcacagatttgtctataccatctataatacataatcatttcttttaaaaaatggcttatgatattcagctttttatgcattcttacagcatacattttgacagactagatgattaatgatgacataggataaactgtatttgggattgtgtaataaacacacagtatgaaaagtctagttaatcctttatgtcagcgcctcccaaagtgtactctgtgaactaccacatcagaagaatcgcctggtgtgtttttaaatgatgtagatggctgagctttactccagacctcctgagttaaaatctcagaggtgagagccaagaatatttatttaacaagattaagcatagtctctaagtaacccttaagtgcacttaagtatgataaccactgctttgtgttgcaagaggctgactttactgaagagtcagggctgaatatgtaacatcagcacataagagcataaaagtagaagaaacccttcacattttattaagcttcttcttatccaggttaattcaatgtattgccaaaattctatttagaggcaattaaagtagctgagaccacatgggacatgtgggaatggaggatactctgccagcaaatgggcccttctgcatttcatatgcatcaccttaaaagtaagaaaatatctgtgctgtatcaccataaagttttaaaccataacacttagaataaatttaagtttcacttccaaaaactaataattactgtgtacctatatagagtccttttattcattgtttaaccttgtcaatttccactggaaatccaaggagtaaggtactataagacaatgttatgaaaatgtgtccccaaatttttgaaaagtcaaaatttcattccattgttgagcagtcagcttgaacagcaagattgttctgaatgatctgatccttccttggaattgagggctagtacaatatcttggctgaatcccacactcctgcttaaaatgtcacatagcacatgagagatgattaacaaaattcttctggcctcactaaaagttcttaatatatcgactaatgtgaagtgtatcaaatattagatactctctatattttaaaattatatataaatctgtagaattaattattcagtaagtttctttcaagaaagtaaataatgaattctgtaagtctacatgttctttattcttgttttgtaacatatacatagattgaagaatcagtctttcctttggtattgatttgtcgtacccaccaatcaattctttaaagaattaagcagtgatctagatggacatgccaactgccattcttattttaaatgtaacccaggcagttacagctacatgccaaaacctacccatagacactgtcaactaatggactgggctgcttcctggcccatcttggtcttaaccacttcatctggcattgggaccagatctattctacccaggatcacaagataacttagaggtggaaaacaagaaggaaataaaaagtaaagacagtaaacacataaaagaaatgtatgaatgtgtatagcaaattccatattaattatcatcaataatagctatcatttattgagcccctattatctgctagattctgtaatggcatactgcataccatttcatttactactgacattagctttgtgaaccgagtattaacatatgcctttattggatgcctactattccaatacactgttctcaggggtttatatatatgacataatccaatccacatattctatacattttatatactaggaaattgaggcttttttgagttcaggtatttcctcaaggtcacacagctcatggcaagtgatagaaccaggattagaaaggcagttctaagtccattttataatgctggctctttaaagaaagagatacctaaaaaaggagacattggagaaatttaaagtgggttctaagattttccacaattggaagaaattactgacttggaaaatttcaaataagattgttacttatgacccacactaaaatacgttttaggaaattaaaaaaattaaatggaagaaaaaagaaacaatttttaattaataaatctataagaaaatgagaaatatttcattgacttcagggttggaaagcataaaagcaatggaataagaatctaaaagtggaacttcatactttttgatttctataacaagcttgagaaaattttcaaaaacaatgacaaaatgttatccttctatataatattaaaaaatacttttgaaactctaaaaggacaaaaagtgtgaatagacaaatcaaagaacaaatgtggtagacaataaatatatgactaagttttcaaactcttcaaaaacgaaaaaggcaaatgaaaaccacaatgatctacttatcgactaagcaaagcaatttgagtttatgattgtgttgaggtggtctctttggcaaacatttgtaatgtcttttcagttagcaactttcaatgcctacagtgtgtgccaaaaatctacattctttgacactgttaattcacttttaggaatttaaacaatggacacaatcaagacagggacaaagatgtacatacaagagtttttatggcagtgttgcttaaaataatgaatattaaaggcaccagttctgtacaaatgtttgggaaatgctaaaaacaatgataatctatccatagactattatatgatatataaaatacctttttaaacttttgtgtggtataggctatactaactttgtaatgtttatttttaaaagtaaaacagaatattattatttcaacatcatgaaagcattacctacacaaacgtatagagtatatgtagaaaaattcttttttttttgtttttgagacagagtttcactcccatagcccaggctggagtgcagtgacgtgatcacgactcactgcaacctccgcctcccgggctcaagtgattctcgtgcctcagcctcccaagtagctgggactacaggtgcacgccaccacatctggataattttctgtatatttagtagagatagggtttcaccatgttgccctagaactcctgagctcaaatgatctgtcttccttgacctcccaaagtgctgggattacaggcatgagccacaacacccagccttaatgtagaaaaattcttgaagaaaacacatcaaaatatgcagtgttaagtttgactaatgggattatggttgctaaccgtaattttgttttcttttatagtcattttcaaatgtcctatatatatatatatattatatatataaaatgtatgtgtgtgcgtgcacactttcacagtagaacatgaaatcatcatatataaaaatatatgtgtgtgtgacacacaaacagatttgtctacttccattacataaaggctagggaaggctatattttacatatatatcctttttaagagaagggagattgtaagagcaaaaaaggcatgaaagggcatagacattttgtagttttatacaaatacttttatgaaataagtatttctatgtttcttaaggttttataacctaaaggttttttttttaataatccatgctttaatagctcttcaatcaatttgggagagaaaacttattatgggtttcatttctactacttagtttttactgtgaaaagatttagtgttatagtttcttaaaggtgtaatcaacatttaaacagcaagtatggtgattaattaagaacagctgagagaggtttcatctatcttggaaggggtccaggtttaaatcccactcagggagatatgtcaatatgagctagtaacagtctacgtgctgttatagaaacagagggacaaatgttgtctttgaagcctaccattgctgtgaagcttaaaaaaatttttttctttgcatgttaatcatgataattttgatagagatattgctctggattcacttactgagtataatattgacacactcttgaaataatataaccatacccttaaaagtcacagctcttgggttagcaacattaaagaaaagaaatcttggtattccacaggtggcaatgccacatggttcaaactttgggccctgcccctaaccaaaaaagggaattgagcatcaagggagatcagaacatgagagttgagccaggaatgtgactgcagtagcttcatcccaggcaggaagcagcagccactcctatatgtcggtcaacagtggaaaggtatttagcacctttgggggaacttggggaagtagtaatgaatggtggtctctatggtaggacttaccagttatcaatttcgggtctgccacttcttaccccaaagtatacagatgaatcatttaaccttatgagaccttggttttctcatttgggaagcttaagaagattaaataagattataaatgtgcttggaatatagtaaagttagctattaatattgtggtaaaaggtgtgagaacaaaatatgtaaggtgcaaggtctcattcattccctcaaggagctgacagtctagttgaatagccagagggtatacacaaaagcaaattgtatattgtagagtctcttgagtagacagatgacttaaaagaaaaagcaagtttagatggcatgtagcatcctaatttgatgttatgtcagtccatgttgtgtaggaaaaaattcaaacatttcagtgaggaatcactgaaactgaataaatacatatgaatcatgtaaaaatgaagaattgccttgcttgctcaatgcaccttttagcaagtgtttatcttaagacatagtgaacatcagtataaacccaatcaaaacacatatgagtaattctcttacttgaaaccatgatcagaagagatggcttttggtcagaccaaatctttgtcatgactacattattagtacaaagttaatagttatatctatgaaaaagatgttatcagtggaggaaactcaattactaatatatcctatgattatcatatgtgaaaaaaaaataaaccaaatcaaagtggagcatctccagctgaaggcaactctatcttggtggaatgccacagggttttaaggtagacccaggttctcaccacgctgcacattatatgctgggctcccattttgaaggttgccaatgagaaatggcacaacctaaacaccttttatttgaaattcttaacatctcgtagtttcacagtcttgccctttaattactgagacaagggtagcctgctaccctgttcttagtcagggttagagatgaggtatctatggtgttaatttggcatttcaactaagttaaatttggttaatgaacaagatctttctgggtacagtttactgctttgccaaaaaaagttctgttatcttttcatatatcccacaataatctaactcttctttaagtgatttttgaagtttattttttgagtaattaaagctagcgtaatttgtatttatattaactgttgtcagctttacataaaaaaaggtaaggtaatatcctccccagggttctgttatcatagtaatcatcattattggctgatatattttaggcactgaattaggttttgggtattctaagaattataaggcatggtttccaccttcaagtaaattgaaattttgttctggaagtagcatatatgacttcctctctctctctttctctttccttccacacacacacacacacacacacacacacacacacacactagtttatattatattacaggtagatatttgtgtaaaaatgtatatgtaaaatgaaatatatagactccctatgactgaagagagatacattttatatacatagtaattataaagaaaacaaactttctccttcgtatcttggccagaataattttgacataccaatgatctcttttatttagaaggttaattaatcttactgtaattacaggggatactgaaatatattactgcatgttttacattaaaaaatactgagtagtcagtaattgccctttcatggataatttatacaataattaaagcttatatattgcttcacataaaatctttttcctcacagagaagagtaaaattatagtttcttatttctttattttttttttctttttgttgagatggagtctcgctctgtcacccaggctggagtgcagtggcacgatctcggctcactgtaaactttgcctcccgggttcaagtgatctcttgcttcagcctactgagtagctgggattataggcacccaccaccacgcccggctaatttttatatatatatatgtatttttgtagtagagatggggtttcactatgttggccaggctggtctcaaactcctgacctcaggtgatctgcctgcctcggcctcctaaagtgctggaatttcagacgtgagccactgcacctggcctatagtttatttctaaaaaaagagtactagtgttcctatgtagttaatatcagcaagaatctagtttctttctgtatttaatttatttagtaatgtcataattgtcatttatctgttaacctaattaaagttagagaatgtcgagctgcagagcctgtctagtcaagtgtattactaaattcattagtcatccatgacttcagctgtatgatagtaatgatacagacacactttactcattaacccttagaaagagttcagcattgtttgattttattgtggatatttgatagaattataaaggaaacttaaaaaaattaataaatagagacagggtctcactatgttgtcaaggctggtctcaaactcctggagctcaagtgatcctcttgcttcagcctctcaaagtgctaggattacaggcatgagtcaccacatccagcgggtaaaggaaactttgaaaaacaaatgtaatcttaggcaatgagtttcaggtgaattaataagagcagatataaattttgctaatcaaggtttgaaaccaagtgttaaaatttagtaagtctgcaaaaaatttacttgatcccccaaattttcactagtttaattcatatcgaccaatgctgcttgacattcctattggccaatttcaccctgttgaacatcttcccttatattgtttttcccttatattatatttccagaaatacttctccatctattctgtgtcaggtactgtgctggacagtggaaataaaaatgaataagtcatggactatttctaccttggagggccaggccaactggggatatagacacgtaaacagatgaatttggaccccacttgagccatgcacaacatctagcacagtgctatgcttctgactcattgtcaacacatatttataaacgattgaatgttcagggtgttggggaccccggaataaatggacttggtcaaacttgagggtagatttaaggcagggttctgaagaagctatccttgcctctgggaaatagactcacagggcccacttaatacaaattcctgtagaagtcaaataataaaagacaactagtaaagaattcttcattgttccttaagcctggcttaagtctgacttttcttttaaaagaagatcttgggcatctgggctaaagtttagttccatgagatgaattagctaaccttgcttttgtttttagttgtgtttaaatcaggaatttccttacttttcaaaattcgctctagagttgatgccagtactcttacaccaacaaatcaagaatttgttttgaaagctgcctcagaagacgttcagatattctttgaaatacagtaataactacgtggatttttgttgacagagttccaacagaagaattttgcaatataagctaagttttttttaaaaggcagtgcaagctacaaatacttgatttgctcatcttttttctactccatgtggtatgtactataattaatcaaacacctacattttcagccaatgctatcttttacattttagtgtaaaattatgtaagtgctataccttgcatagaattcaaattgaatagcccaaacattcctgacaattacagttcatagcacaatggtaaatttagaaagttacagcaggtcacatccaatgaggataaagtggcctctcagttgtgccctggtcttatgggaaaaataagaaaatgtcagctgcatgatattagtattctgagctcatgagaaaactcctgtacaaaattttgttttagtctcgtgtgtgtgtgtgtgtgtgtgtgtgtgtgtgtgtgtgtgcatgtgcatgtatgcgctgcaattccttattttattctcactgcctggtatttcattaaatatgttgatgggtcagcattattcccttccaggggcattacaagaggcccttccttattcctaggacattcatgagcagagaaatgggaaggagtgaagcgaaatccagtgtctacagaaaaactgggccatctcccagaggtcactctatggcctctatctttagtccatgcccgtctcttggactttttagccttgcatttttaattccctactctacagtgacagcacttcaagttcaatccggtcaaaaccaaactgtgttcttctctccaattttagggtattctgttcccctaaattattgatctttattgaaagtgtcacttattacacgcaaaagctagaagtctccaacttttccctagtttctccttttccataaactttcagagtcaatttcccccaagttttacagcttttttttttctatatatgactaatactttgttttcacatgtccctgatgacactgcttatcctcatcacatgctagagtggtaattttaaaatggacattctgatcttgccttttcctgtcttttacttatggtgtaacactcaatctccctattaggacatacaaaacattaatggtctgggccctactttacttttagagttttacttctttcctgtttccaatatgatctttataactccttatactgaatttatagttttctctatactgtgttctttcgtgcccctatgacattgcacttgctattccctgggctggctctgttttccacctgacttatcagcaggaacctttatcaaacactatattgcaatctctattctaaatgtaaatagtaaaacaagtttgtaaaacaaacaaacaaacacctattgcttagactactgcctctacatggatctccctgggtctacttttcccacttctgttcctggtctatcttgtagctaaaggttttttttttttttttttttaaacttcaaagattataaaatctttgaggggatgaatcatgtttatttcttctacattcaatccctagcatctaacacagcgcctggtacatagtaggtacttcaaaaatatttctttgattctcatctcagctaaataactcattgttaaggacagattaaattatttcaactatttatcataaaataacctgctgtttgactgatttattttcgcttgagaaattgaaagctataatttttttccagtaggtttacatatttagatagatacagctagatccttccagtaatttaatcaagtcaactcagtgagttaaactgggaagcaattttcttcttatacagtacacatattacatattctttagtctcttaaaaaattttatgttaaaaagatttgttgacactgttgtgcaccagtgggctggcatgatgggagtgagaaaagggatgcaaaatgcctttatatatatctttcagtataatgtcgacttattagaattggaatttttccttctaaagctcaccatttgcactcagtgtccatgtaaattgtcacaaatatgcaaaagatgctgaaagctgtgcatccccatttgcgacccacatactttggagaatggggtgaatgaataagttctcaaaaattatatacacattagaaaaatgggcttttgtcatcttacagatgacaatggactttttttttaaattaaaaaccaagctttggccgggcacggtggctcactcctgtaatcacagcactttgggaggccgaggcgggtggatcatctgaggtcaggagttcgagaccagcctgaccaacatggagaaaccccatctctactaaaaatacaaaattagcctggcatggtggtgcatgcctgtaatcccagctactccacaggctgaggcaggagaatcgcttgaacctgggaggcggaggttgcagggagctgagattgtgctattgcactccagcctgggcaacaagagtgaaacttcgtctcaaaaaaaaaaaaaaaaaaaaaaaaaaaagaaaacccagctttatggagatatattcccatatcatacaattcacccatttatagtatattatccaatggtttttagtatgttcacagagttgtgcgaccaacaccacaataaatttcagaacatctttatcactcaagaaaggaactttgtaaccatcaatagtcattctccatttctctaccccctcccccttgtcctccccatggcatcctttggccccaggcaatcacttaccagtttttcatctctgtatgtttgtctattctggacatttcttttatatcaacaataagcttaaataacagtttaataaaagggactaggctgggtgcggtggctcacacctgtaatcccagcactttgggaggccaaggcgggagatatttaggcaagtagagtcagatggtcacagtgtggttaagctataattaagtgatatctcctaggaaaatcaatcacatatgtatatatattagactgttacaaatgaaaaaccagtgtttccacgtgcatcttcatggggccacactaagatcaacagtgtgagaaaatgtaccatgatagaaaaatatatgcaagttcttttaaaatagtctccgtagtttaagtaattgtgaagttttaagaatctattttttgttcaatcctgaataatttaatactaaacaagcaatctactttttagtgtgtgcagcccttggggtgcggtcagcacctcatctgtgttgtgtcacgaagctgcttctgattgagtgatgtctgcttcagagcagatggtctctgaagctgcagaataaggagaccaatggggataaaaatgtggtgcctacctcaagggggcaagagtaaattaacactataagatgcggatgcgtagcataatgaaaaattgatgaaaggtttttttcacttggttgggtttgtttttcatatcctgacagttctaaaagccttgaaggaggctaagacctaattcaggttcatgtatcctaatccttaagtattgcagtgggatgagctctaatatatctttttctctaaacatcctgtaatattttaacatgctgattagggaatgaaaagagttttgtatagagaatatttcttaaagaaagaattaaataaactactgttaccaaaggatctcaaaagttctctcttttttctctcgacccaaatgttgttataggtggttgtaattcatttataaaagcaactttttttttgatgaccagtgatgatccaaaaggaaattcctttggatatttgtgtacaatatgtaaaaactctgtcagcttttccatgcttgggcctatattcattttggggcatgttgacttttagatgctggcagaacattttttacagagctatctagctagttgaaaattgggaaagagattgggtctgtgatacaaattgttttaaaaataagtttttcattattttatacccaattaataccagttggagatcctaaagcaataattgagaactatttagaattcagtcatatatagatgctgtgggtattattaaatatccaatgtggagctgtaagatttgattatttctattgctggcctgaagaagtacagatttccatgttactttggttattaaaaatattagggcaaattatctggaaaccataatagtcaacataggacttgtataatgttttgatttcctttacattgtcagcattttgaacataaaacagtaagcagaacttttcaaatatatctgttcaaacagtatggttagaggttgtatgtggaattcaactatgatgttttaagatacctccacaccaagaggaaccagtaacaaaaatgagggaatcatattcttctagttcttatgttattctctagaagtatgatagactctttgggaaggaatattaacttttgctacagagtttaatggctaaagaaactaaggtgcttacctgactgaagcagtaatgtcttaaatctgtgtagctgaggcctctcaaagagtatcttatttcttgaaaaaatctgaagccttagataggtgtggtaagttttaacatggacctcaaactgttatttaatctgacatctgacctaaagctgtagcaaaatgtttccctgttactctgattttcttagcagaaatttggaaatgttgtgatacaagtcacaaatattttcatctataaacttaccatgttcctattcaaattcagaaaatactgacgtgttcagtgttggaacttctgagttctgtaggcatttcagagttatcatgcctggagtacaagtaatcaaaacctattgattttgttccttacgagaactttaaattttaaattcaccataaagttcaataggaaactaacagaataataaacacctaagaaagttttcacctatctttgttaaagttcccattttagtgaaagattttgttgcctcattgtcattaacattttagtaactggcatagttatagagacattttatgaagccaaactaatatcaacacaacaaagttatcttttaagtcacacttctattatgtcatgaaataccaaatacagatttcacatttcttcagtttaataattcttcaaaaatgagcgtatatttacactcatataagtgtgtatgtatatatgtatatatatatatgcatacatacataagcactttctaaagttttaaaagcacatagagaatgtgaagtatgaaatagttatcaaatagttatcaaagatatttcatcagaaatatcttttctagtttgtggtttttgttcctactagtttttgtttttttggtttttttctttttggtagtaattctcattcactggaggatagcatcacattattaatattttgattcaattttcagaaaagtaaatgccataaaaaaatgagtattcagaactttttaatgtataaaattgtctctgataacttacttcacttatatttatcccggaaaatttaacaactgagatctctgaaccagatctggtcttcttgaatttgtagtaaacatgttgaagaacaggggagtaatgctatttatacaatatataccaaggataataattcatgtataatcaaagagaattatgcaatttttgtaattacaaagcctcatgaatatcagaacaactaataaaaaattatccagagtttgattcttagtaagcattcttttgagctaaagaacaaaactctatgtatttagtaatctgcattgtctcttagactgtaccataaatatacaatacaaatttcattaaaaatatcacataatatagtctgcatttaaaaattgcctccagtgtgaaaaaaagataatgcttttgaatactaatttttaaacctatttacttctctgtgatttttgtaatcagtttataaattaggaataacttatttttcaggactactcacatttagctaatttttaaattttttataaagatgggttctcactctgttgcctaaactagggtcaccttttttttttttttggaaacagagtttcgctcttgttgcccaggctggagtgcagtggtgatcttggctcactgcaacctctgcctcccggatccgagcgattcccctgcctcagcctcccaagtagttgggattacaggtgtctgccaccgtgactggctaattttgtgtttttagtagaaatggggtttcaccatgttggtcaggctggtctcaaactcctgatctcaagcaatccaccctcctcagcctccccaaagtgcggggattacaggtgtgagccactgcgcccggccaggtcaccatcttttaaagtaaatattttatttaattatagcacacatacagaaaaatgcataaattataaatgctcatcttgatatgtaggaagtgtacatacctgttaaactgcacccagaactagaatgtagaattagaacattatcagcaaccaaaagcccctttctgattgtttccgaaactactactgatttctaacactatggatttgttttgccagtttttgaactttaataaatggaataaaagacatgtccttttttgtgtctgacttgttttgcttagcattatctttgtgagatctattgatggtgcatatagatatggttcattcattcctattcccactgctgtaaaatattccaattttactctcttttaaaatacaagaattttagaaaggaattcatgaatcttgacacaaccttgcaaaataatcttaattaatgctttgaaagagatagaattggtatgctgtaggtggttcttatttttcatggttggtatcttagggaaagcgttgataagtgatataatttagctagtgtgctagcaaaaattagtgttaaaatgtaatactaagttaaaggaaaaattgctgtctttatttaaaaaggaaatttcaaataatctctcacttaaaatatttaggtagaatttatctgtttagttaaacttagatattgttatgattccaattctcaattttgtgtgaatagttatcttaaataacattcaaaagtaaaaatataaacacttaagtttactctttcttcttcccctaactaaagcatttatagagttcacttttatgtctgaaccaattttcttaacacaaaggccattggattaagaacactcttttgagaagttgcatttactctctctgaagattaggggacctgtcagtaattttcatttagtagcaatctaaagagctgttgaaggacaccatatatgtaggttaacctgcatgtttgagccagagtgtacaaatttatggtttataaattggtagcagctgaatagaaattgtcaagtgggattttgcagtgtaaagtgttttatatcacttatgtgttctgactgcaagaaagtaacttctgcaattctttctaaaaaatcctagtatatccagcatgcagttcttggctgaacccaaattgttggtttcgacaagacagcaataataatgtgagctaatgaaagagctgaattaattaaacaatagagcagtccttggacagaagtataaatctgtaggtacaagcattcagatatcacaaagagagttctctgcagcatcttcatcactggtgacagaccacacccagttctggttcattttgtccttttatacctgtacatctcagtgtatttttaagtactctggtgtagcttaggcctgctggcaacacagtaacgccaggaatcttcacatttaaaaaaagtcatgtgtgtgcatcgataatttgatttattattgttattttgcatttatccctcacaagaaaagccactaatataaaacaaactcagtaagtgtcctctgtgcctgtcagtggggtaagcatgctcaaatcatcatattttttccttagcaattctataaagtacatttatttttttgataaggaaattgagacatacaatgacccaagatcggacaagtcacaatttgctagacatggattttaacttatcctacatgcctaggaagagacctaaaaaattgtaaaaatgtcccttattttcctggtattcttattaaagtttttcccttcaagttactttactaggttttatttattttgtattgctataaaaacgcagatctcagagtagccaggtaaatgaccctgtttttacaaaggaatgactgcttcctaagaaaataagcagattcctcaaattccacaaggagcctgtgctttacgtaaggttagccagtcagcaaatatgtgtgtagggcgcaccataagccagagactgtgacgggggaggtgttcagtgtcactcttttaaggctagtagggactgctggttgggtcaccgttttagacaagtggttctcaaacttgaatagtctattgatttcttttaaagtatataaaaaattatgacctccagtgttatttttattatagtgttaagtattaaaaacataaagccacataaaacttcttaaattcttgtgccactataaaaaagaaactttgacaaattaagtaaaacttatgtaagttttataatattattcaaataaagggcataaatttaatacaatgaatggaaatgtctgaaactaaatttaacatattgtgcttagtaataaaaaaagaaataacctcagagttctgtatttagtttctgaatttgactccagtaaaaataatataaagaataccttttttgtaagtatgttgtacaaactattcttaataactttaaggtgttgtttcctacttcaagctaataaaacttatagctatcagagaatagctttaagagaatataatctttgaaagctctctttatttgcttggagaggaaattactattgggatagaattgtgtacgcaaaccaataaaagctaaaattgaaaactgaaaaaatgtttcactgtggattttctattacactcactgctaatggtcagtgcacgttggactatatgaagatagcatctgagcatatgttaatatgctactgactgctgctgctcaggcacttttggctcgtcatgtcctgccatgtatgatgaacagattctctgaccattcttgtctctgtactacagcaaaatgttctgtctattatgcatctgtatatcatttggacttcacttgttatgtactgagttataaacacaaagacatataccgaagttatatgtttatactcacatatagggtagccatgtagaggacctggaatatgctaatattttctttattaggttattattgaaacgtaagcacagaattaaagaattaaaaaacttgtagcaagctcatgggcccctgtggacatgcccctagagcctttgggtcagcactccttggggatataatgtggctctatgaatgcacattcctccctgcctttcatgtccacactgctgggtgctaagaaagttgttctgtgtttctaatattcagatacaagacaacatacagaactgtgtcaagaataatttaatgggaaatttttctttcttggcctgagatgtcactccagggttataaagggggcaagttttaatgacatccatctgttgcagattaaaataggtggggctcagcattggaattccttgtccagagtttgactatgggcatcagcacaatttgttttaggatttgagagtcctagggacataaagcagcaaagcagggagaggatagtcttacatttgtctgagactttcttccaaagaagttgcttttgcctcattttctctttattttgcttttatgtgtgaaatctcctggttgagcaaagaaaacagtctattttaaaagcatgcttttcctcctacttatacttgattttagaactcttgcttttatcataatcagttgggaaacacagcatggtaaaaattgctgtatctctctccctgaatgtttgaatcctctttcatctctgtgttgattgaagataaccaggctaaccactgtttatccaaagcgcttgtgtcaagggccttaatcacagattgacctcattgtagggtacgatgtgcttgtgtctatgtggaagggagagaagaatatgtatttctatgcaggtatataaatttgggcttcaataatgtcaatattcatacataacttttaaaacctcattttatttctgtctttggaatttacattcttggaccattttatgataatatttccatttaatgcattttctcactttgggggaaaccaaatcccttaaaggggttctagaagaattcaacttacccaaaagtctcctatgactcaactgctgaagtggtctttggcagaatggctcagatattacatttccataggacccagacccttcagaacactgggagcattgtttgctaaaattctaaggatttgctataactttgacatgcattcactttttaaaagtttgatgaaaagagaaaaccagttatgaaaactttttgttactctataacggcaaaagcaatcctcaatgtcatgtccaatccccagagaagattcaaagatggtctattatatactcctcagcaatacctgaggccccatcagaccatcattgccactccaggctgctgcattggtgtttctaggtgtctcttcattcctttggtgtcaggctcttcttctggctccacctgttcacagcattcttttttataggaacaatagagcaacctgatcttttgctgagtttaatcatgttaagcatgtagagggagacagacaattggcttcttaatgcaaagcatcctttatcacctgtttcctcattctcacatgaatgtgtttctaagtagttcatctcagattggctcttaattttctaggtgcatatagaggggtgatagttgtgagggtagggatggcagtcaagaattttctctccagctgaggcactttatttagcaagtgccatgatttacagagtaaatatgtagaccaaaggcataactggggttaatgcaggtgaaataaacctagagctcacaggctaggaatctgtagtaatattcactgtgatactttgaaggtgtgggataggatagcagataaaacttacagctctgaactgataaacataaattaaatctcaggtcttccactaaataaatgtgtgtaaatacgtgactctggaaactttctaaatctctttcctcatctattaaatgggcataagaatagtttttttctcatagtattgttgtatttgtgatataatacatgtgactccttgagctctgttcctgacccactaaaccctcagtaaatgttacctataagcatctgctttatgtacaaattggaagtactttctaggaacaacctctaatataatatatagcacacagatttgttttggaaaaactttatatacaggaataatatgttcgtattttatatctgtaacctaatactatttaatttttgttgttttatagtaaaattaatgtttcttgtgagatattaatataacataatacacagtattataactcacttttaagtgctgtgacaacaaacctgaaggtaggaaatcctcttggaatttagcatatgctgcaaacagcaaaataaatttcatagaataggcatttaaaaacgagtcacagttcagtcgctgcagcattgcagatattcttgggggcactctgccattggtacagacttcaggaaggatgaagagtgaagaacagtgtgatattaatcatatgatgatggatttctaaagaatcagggcatgaattctggatgtatagatttcagtcacacctttcaactcttaataaataatctatctcatttataaacatataagccacttggtatttgggttaaaagtgaggtaacttagttctatggttttcagtctttccatgtgtaaatcattttaacagtatgcaagtaattccatatttgaaactcccagagaagatacttccatttctatctctgtacatcaccacagatcataataaatagctctgaccgagtatgccaagaggttcttgccaagtactttgtttgagggagggaggcagtgtagcctagtgaggagaatgtttgattaagagtcatcaaaccttcatctcaattcctaataggtaaattgtgtcccttttcatgcctccattttctctttagtcagatattatatgacaaaaaattataacagttatgcaggtgtcttggaacccaacaaaagtttatcatcgttattatgttaaggtttaaaagtcagactttataaccaagccagggggccgtgtgattgtaactgtgcatctggagcaactctcttcggacttttcacgggcagaattcagctgagtctcccagcatctgattttgagaggagtgtgggaagatgagaaacttaaaaagcagtttccatccagagtgatcatctttaccaaaagattttagtctggtattatgtcaggtggtttaaatttaatcatgtttatccagaatcactgggatcacaaaatttgcatcagcccagtccacacctgcgaagtagtgctatcccctttcctcaaagcaccctcggagctttctgttattcccttctaatgagaccagatgactgccaagtgacccatactcagtgttctctctcagaagcatctgaaaaccaacaggaaagaaagagaaagaaaaaaacccagtagctttaatttctttagctttctgattcttttttgacttgaggttagctcagtataaagtcactagaatcttgaagctaaaatgaatgagtaatagcagtacttgaggctagcatcaacacgtcttcaattgtggctgaagatttagaataaagcagtaacaattatttccattttaatggttcttttatactctaaaatattgacttttaatgtacttagacaactctctagaaatattgtgaagttgctaccttatatagtgaatgattattcaatgttttaaactccgtattattgaaatttttccaactaaagcttttctgacttcagtgtaaacattcttgtctttctgtattggatacatttctatttcatcaatagttcattaaaggtcttttatttttctcgcagtctgacagcaatgcaagcttcctccgtgctgccagagcaggcaacctggacaaagttgtggaatatctgaaggggggcatagacatcaatacctgcaatcaggtaagaacatggcagctagctctgtgttgtgcaacgaaggaacactcattacattctcagagcccaagattatttttgtctttattaaaaatactaaaatatcagtgactcagacttctgaaatcccattttttgcccccttaccaacttttcaagtatcagatgtttgtatctagagctaatgttgctgaaaaagcagatagatcaaaaacaacaactgaatgtcaattttgtttgtgaaatgatttgggccacctttagctggaattttgaccaagaatgatgttttacttctcatttatcatctagtaatccagatcttggcttctttccttcttgactatatgcactttactcatgggaaactgattattacaatttagtatacagaaataagaggataaaatgttctcctaattaattttaaaatatggctcataatgagaataatttgaaattattattgtaaatgatgtatccattcatcatgtccatttcataaggactttagagaatattatacactttggatattatttggtaccaacgttgacatttttgtgctatttttgagtaagatttttacatcatgaattaaagtgtctagtggactgcagtattcacttcaatgctaaatgttgtgttgtgtgttgtgtgtatgtgtttgacagagacctaactaggaagtgaataattctggctaattttaagttaaaaggaggtaaatgtcactactggattctaaattatatataaattcctttttctatatcctggtatatattgaacccagttatgtttactttatagaccactgaaattaataaatctttcaaaaacaacttttcagaaactgagcccggtatcttatcctcaaacttattgtactccctaattcctacctgctgatttcctcaccaatgtgccattccaacccaactgtttcccgttcctcatctttccccctctccagcccagcactcctctctttgttcaccttctgcatccagattacatgagctcggatcaccttgtggtacttaacagagttgtcataacagccttcttactaggttctgtcttcaatcttgtccactttgatcaattctccacataatgccttgagcgataaataaaataaaaataagattacaacacttccttcctccccaaacttctatggctaccctatatggctaccaattcccagatcagtgaggtggttgtttcaaaatcacctgcaggcttttgcaaagggtacaggatttccctccttcttcttcagagtcactggcataaagagcattgtcactgatgtcaatatttctcatattttaggggagtgtgtctcttaccgtgaaaacatgttgagagctacttaatgttgggaaaggcattctgctgtggccctgagcagtcctgcagatacttttgggaataacaagaatgaaagactttgggattgctttttatctgggctatttctcagggtggtgctcgcagtgagcaaccttgagggattaggcgatatctccctctagctacaaagcaggcctgtatgaatcccccaaggtcagtgttcttctttaacacaacccacatgtatgggcatccatcattggtcctttgtgtcaaccctgttagatatgggggaagaaagggatagggaactggtataagcagcaggctgacacttggctactgcttttgctctgaattacaacgtcctttgtttctcacccagaagacttgtgtcttctactagcattatgaaacagtaatggtttagtttttaactctttggtaagataaaatctcaagaactttacatagttcttaacactgacctatggaataaacccaaattactgtattccaatatgtaaaatcttcgtatgttgtgtctacattcctccatcttatttttcattatgaatcattttatctgatttttttttgtgttcttttggacaaataatttgaactttagatacattagttaccttaagaaagaaagaacattcaaactcccatatggatatatggacttattctataaaatacttatgaagttgaatatgaaatatttatttatttatttttattttattttattttattttttattatactttaagttctagggttcatgtgcacaacatgcaggtttgttacatatgcatacatgcgccatgttggtgtgctgcacccattaactcgtcaattacattaggtgtatctcctaacgctatccctcgctcctccccccaccccacaacaggccctgggtgtgtgatattccctttcctgtgtccaagtgttctcattgttcaattcccagttatgagtgagaacatgcggtgtttggttttttgtccttgagatagtttgctgagactgatggtttccagcttcatccgtgtccctacaaaggacatgaactcatccttttttatggctgcatagtattccatggtgtatatgtgccacattttcttaatccagtctatcattgatggacatttgggttggttccaagtctttgctattgtgaatagtgcagaatatggaatatttaatacttttcacgtaaacttaggtttccaggctggagtgcggtggcgtgatctcggctcactgcaggcttcgtcccctggggttcacgccattctcctgcctcagcctcccgagtagctgggactacaggcgcccgccaccacgcccggctaattttttgtatttttagtagagacggggtttcaccatgttagccaggatggtctcgatctcctgacctcgtgatcagcccgcctcggcctcccaaagtgctgggattacaggcgtgagccaccgcgcccggccaaacttaggtttctttaagtagattaaatgcactccctaaatgtcaatttgttaactttctaaatttacaatatgctagagaatagacaatgaaaccgttagttcatttaggtaaacttatcataaataacaccaaaaaagagaacctaaggaaaagaaagttcatttcaaaccaagtctacttcacactgaagtataacaaatacattaattgtatgaaaggtcttagggttattttgagaaagaataatctctcaacagtaaatactcaattcttatcatatttatagaccatcttagcttcttgagttagctttttcttatagtggccagccatccactaacatgtcactataaaaggaaagaacatttatttctgtgagaaggcaacatgatctcatgaagcccacacaaaatttagagcccacaggttcaaattcaagtttcatctctactttgaagaagtcagctcactttagaaagtgatatttttctaacttgtaaaacaggataaaaacaatacattcaatgcttatacccctgggttgcaatttaagttaaattatgaaatgtaaaaggagtttctaaggtacatgtgttctaattacaattactgtatataattcaccaagaattatacaaattaaaattgacttacactcaaaatatgaggttgattctcttcaattccctgactcgccaggtataaagtaaatgcaaggccaggtgtggtggctcacacctgtaatcctagcactttgggattacagtgggaggctgaggcaggaggattgcttgagcccaggagttccaggctgcagttagctatgatcgtgccactgtgcttcagcctgagtgggtgacagagtaagaccctgtctcttaaaaaaataaataaataaaacaggccaggcgcagtggctcacacctgtaatcccagcactttgggaggccaggaggtgggtggattgcctgagatcaggagttcgagaccagtctggtcaacatggtgaaaccccgtctctactaaagatacaaaaaaattagccgggcgtggcagcaggcgcctgtaattccagctacttgggaggctgaggtgggggaattgcttgaactagggaagtggaggttgcagtgagccaagattgcgccactgcactctagcctgcgcgatagagtgagactccatctcaaaaaaaaaaaaaaaaaattccccaaagtaaatgcagtctcatgctggttctgtatttttattaatactattcaagacagtatattaattaaataaagattagggaaatacagtgactaatgttacctgcttagctactgtgtattagactttgtgctggggctttacatgtgatgtcttatcagtcaactgagatgaaatattgtgagacagggattagttcaagtttacaaatgtagaaactgggcccacagtggttaagtgacattcccagggccacatggatctgtctgtgtcccaagtccaagcttttttctgctgcaggatatctttttgagtagctatttggagctgcccttcaaagtaatacagtggtgatgtcctttatcttaaagctcaaaacttatttttaatctactactgctaatataaaaataactttattcataggtggttacaggatcttttaagtcaaagagcaccaccaccaggatttctactaaaactcaaatacaatatagaacaggaaatgatttctaaatacccaggaaagtaaaagagacaactattcagccaaactattgctatttctaagtatacaatattcaaagataatatggcatatgaaagaagaaaagaaaatgtatcctctagtttgctgctaagcctgagtttctagggagcattacaatatgtaatgtagaaaccaggactttctgtactctgttgcatttctcaatgaaaggcaatctgagctgcaccagctttccaaaaatatcacatgtgttggcgtgctaagattccttaaactgaaatttgaatcaatgttttttctttataaaattggtttcacaactaccatgagaagtttaaaatgtaattcccaaatactattttgcttttaattatttaaatgatatggggaaaattcataaatttggcacatgaaaatactctaaaagaatgtcaagttttcatttttcttttttaaatgattactaatatggttaacttttattttctttaaaagattacaccagtcatctttttaccgtattatctcttgtacatttagaagagaaaataaatcttagcgttcaatttatttctgaaactcataaagacttactttcttacctattccctatttagtaattctgcataacttaatactgttacaaacaagattaacattcggacattaaaaataaactgtatagtattttaataaaagtttgtagccagttacaagtcaataaaaaccccagtagtttcagaaagtttcatcatgtatacaatttattagtttcactatagtgacttcaaaatgaaagactatcacttagcatttatttaatacaatcctggatatgataccagtgattaacaggtcttaaaatgccctgaattttggccttggccttttaccattggagtttaaaggtgcaaaattatcagttaaatcctgtgtttccttttttataaacagaaggcaaggtcgaagcaccattttcaaaacaatattaatgttcctcaaatagcagacctttagcaacaagaagatacactcagcaatgactttagcatatgctcacacagtatgactcagaccatgaagcatatttggaagtcacattaacaatgtggatgctggaaaccaaattctagttttccccacttaccagctgagtgaccctcggcagtcagcttctgcaggcctgagttttctcaactggagtgagcataacaacactgaagttttagggttgttttgatgattaagtgaaatgtttgcaaaatgcttggcagagcaagtactcaataaatacttgtgaaaatgatgcttattataataatgtaatttttttatattgattctcaacctaagctttagcaaaagtagcactgattcgcacaagcaggacagaacataaaaggtattgccatagcctgtatcaccaaatagaaaaaaattatgattagtagcaatttggtaaagttactatttatctgggttgcattaaactgaaatatttatctggaactaaaatctttttcacaaatgccatttgggttcatctggtttagacttctctttaaaaatactaaaaacaattctattagcctgggaccttataaaaacaacaaaaatgaataggggagaattaaattcatggaattaatggaacatggaatgagctatatgcagttttctaaccagttaaattaggcacaaatatatatgcaaaaatataactatatagctaaatgcttattattgacccctcatttagaagaagcaaaaggtgatgtttccatctggttctggttatgtggttttggattctgtgccatcctgtaatctctttcgatgcatcagtgctggtccttgctctatactgggtagtgctgattcaggttagaattgagtaacacctgtctaatattttgagtacttagaaattttagtttacttgttgatatttgctcaatgtaaagtaaatccagtagagagttttcatcaactacttgcccccagctctaaaaacttcattctgtttacaattaggcaggtttatgaagatttcgaaatgtgactcttctttcattttaaaaatgctgggagtagcttcatgcaaattatttctatgactgtcttattaagtactctccgcagtggtttagatcggaacagaacactttataatctggaaattctcttgaacactctctttctatggctaagcgacatggattttaatatctgactccaagcagccactccactcttcctagctcatcttagatagtagaatcgcagcatttttttctgccggtctgaactcaggcacgctatttgttcatctacttactcaaacatgtattgtgtgtttactcagtggcaggctctgtcctaggtgctggggatggagcagtgcagagagacaaaaactctgctctcataaagctcacaatctacaacctgagagaagaaaaggcagtaagtgatatggaggaaaatacagcaggggagaaggagagaggggtggaatgggagcggtgtgtcactttagaggggatggacagaagaaaacctaaagaaattgagcaaggaggccgtgcatgctgtggagggagcacactttagaagaaggcttgacaggtgagagaaccgcacagaaggagcatgctggcatgttcaagggccagcaaggaagcaagcctgcctggagtagaatgagggaggggaagcgtaggaggaggttggggagagcagaaagcagcattgggtcatgtaaggccttgtgggctattttaaggactttggctttaattccgaatgagcagagaagtgattagagggtttttagtggaagagtgacatacgctgacgagtcttaatagtaaggctcaggctgaaagggaacaagggcagaagcagggaacacttttgtgatactttaggtgagaagtgaggtgttttacagtagagcaacaggcaggagaattggtgagacgtggctggattctagacacatttcaaaaatacagctgattttgttgatggagttaatgtaggatgaaggcaaaagaggaattaggcatgagggttgaggtcacaatggaaagaatgagagctgaagttttattaactgagatggggaagactgtgtgaggagcaggtttgagggaatactcagcaggtcagttttgaacatgttaagtttgatttgtttgtgtgatatccaagatattcagtaggcagttggatatatgaattttctagggtccagaaaaaagattttggcctgaagtgtacattttggcatacccagtgtatagatagtattcaaaaccgtgttactgcatgaggtcaccaaaagagagagagtttatgaaaaatagaataggttcaggggcttggccctggagtactacaatatttagaggtcaggaagatgagaagccatcaaggagaatgggaaagagtgtccagggatgtaggaggaaaacctgaagttgtgatttcttagaagccaagtgaaaacattattttcagatggatgaaatgataaactctgtaaaatgctgttgatccaataagctgaggaactgaacaacagccttagtaatgtgatggaaactggtgacttgatcatagcaattttggtggagtggaggggtaaaagctggactggagctcattcaatggatgacgggcagaccaaggactgcttcaagggctctttctataaaagaaagaagagaataagaaaagtagctggaagaggaagtggaatcaagaaggctttctttgtaataggaaagaaataatagctttgttttgttgatggaaaaatatcaacagggaaggaaaaataaataatttgagagagagatgggagaattactggatggtgtccttgagttgatgagaagtggggatggagcttggtgcacaagtggagggactggcttttgctagaatcgtggatagttcaggaaaaggaaagatgtatgggcagaggagcaggaagtggtgtgggtgccgtgctgggagctggttgtggggtggaagttctaattgcttctgtttttttcagcgaaatatgattctaggttatcagctgagagtaaagataggagaggaggggatggaggtggaggagggagaaggtgtgaaataataatccaggagagtgggagagatagcagttgagggtaagacagtatgattggcaggcagcatgaagggtctgcttgagcatcatgatcaggaatttaaagtgagtggaggtggcatgtgtgtgtgttcttctgcagctacattcagacatgggatcacatggagagttatatatagccaggaatgtggtttagctaaacacatatggcagaactagagaaacacaagggaactgaggatgcatataaggtaatgaataaaataacgataaagactatgcataggattcatgccaagtgaggagataagtgggcaccgtgaaaagatgaataggctctaactattaaggattgaaggatttctggagttggatgagtagattagcaagagagtaagtgctgttcagagggttggatgcttaaaattgaaatactagaggaagtttataattattggaaaggaaaatgtctagaatgtgaccatggaagtgagcggataaggtagagaaaagaaggaatcattgaggaattcaagaacctgaacacctggagttttggaagagtcacctgtgtatatgtaggagaaagtggcagtgagctagaagctaaaatcttcaagggacaaggaatggcatcaagaggatacaggctgatgacatcaggaggtttaaaaagaggaggaagaaaaatagtttaaaagagtttaaaagagtggtgagaagcaagaagcaaaatagagctcccccaagttcggtgattaataggaatacgagatccaaagacactgcttccctgaagtctactcaagtgaagtatgcatcacttgagtagacttcagggaagcagtgtctttggattctagttagagcaagaagcttaaaagggatatttagagaacagatttagcccagagtatttgctaatgactacacccatgcattctaaaggatcagtgtgggagttttgggaaatgggaagtgataggagacagaatcagaaaaggaggtatacagaagtggagagggataagatttgcagggatgatggtggagttggtgactatcataaacagggatagaggacatgataagtttagcccagacagtcccaagcagatagcaattgtgactttgtggaaactatctggagaaagaagtggagggaatctctccaggagtctgtagagttcaggagtcccatcttgatttttgctgttggagacaaagagaggaaagatcttaatgcaaatatgcactcactgcaattcttccagtatgcactacaaacacaggtggtgtgtgagatgaggtgaagctgccattcctgcctagtcatttttctcctggttattttctttgtgcctttaagaatcttccagcccttttgcagtagctgagattttgccaactgatgttctcatattctgttttatggctgatcattaattcttttattattattattattatactttaagttctgtgatacatgtgcagaacgtgcaggtttgttatataggtatacacttgccatggtggtttgctgcacccatcaacccatcatctacattaggtatttctcctaatgctgtccctcccctagcctcccactccccaacaggccccggtgtgtgatgtttccctccgtgtgcccatgtattctcattgttcagctcccacttatgagtgagatgcagtgtttggttgtctgttcctgtgttaatttgctgggaatgatggtttccagcttcgtccatgtccctgcaaaggacatgaactcatccttttttatggctgcatagtattccatggtgtatatgtgccacattttctttatcccgtctatcattgataggcatttgggttggttccaagtctttgctattgtgaatagtgctgcaatgaacacacatgtgcatgtgtctttatagtagaatgatttataatcctttgggtgtatacccagtaatgggattgctgggtcaaatggtttggttctagatctggttctagatccttgaggaattgccactctgtcttccacaatggttgagctaatttacactcccaccaatactgtaaaagtgctcctatttctccaaatcctctccagcatctgttgtttcctgactttttagtgatagccattctaactggtgtgagatggtatctcattgtggttttgatttgcatttctttaatgaccagtgataataagctttttttcatatgtttgttggccacataaatgtcttcttttgagaagtgtctgttcatatcctttgcccactttttgatggcattgtttttttcttgtaaatttgtttaagtttcttgtagattctggatattatccttttgtcagatgaacagattgcaaattatttccccattctgtaggttgcctatttactctgatgaaagtttctttcactgtgcagaagctctttagtttaattagatcccatttgtcaattttggctgttgttggcattgcttttagtgttttagtcatgaagtctttgtccatgcctatgtcctgaatggtattgcctaggttttcttctagggttcttatggttttaggtcttacatttaaatttttaatccatcttgagttgatttttgataaggtgtaaggaaggggttcagtttcagttttctgcatatggctagccagttttccccacaccatgtattaaatagggaaggcacagcttgagcagacttaaacgttcctgcctgccagctctgaagagagcagtggatctcccagcacagcactcgagctctgctaagggacagactgcctcctcaagtgggtccctgactcccatgcctcttgactgggagacaccttacagcaggagctgacagacacctcatacaggagagctctggctggcatctggcaggtgcccctctgggatgaaacttccagaggaaggaacaggcaggaatctttgctgttctgcagcctctgctggtgatacccaggcaaacgatctggagtagacctccagcaaattccagcagacctgcagcagaggggcctgactgttagaaggaaaactaacaaacagaaaggaatagcatcaacatcaacaaaaaggacgtccacacaaaaaccccatttgaaggtcagcaacatcaaagaccaaaggtaggtaaatacacgaagatgaagaaaaaccagggcaaaaaggctgaaaaaaagattctaaacagttttttcttccctctgtagaagtttcccagtactttcccacccatccctccctcccctcctggatatcttcccgtgtctctctctctctctctctctctctcttctctctctctctctctctccctcactcactctctatctctgtattgatgattgtaaagaagtaaacaaatcctatgatctctagtcttttcaaggcctcttctcttatggaatacatagaagaaaagaaaaaggaaaccttattttaaaatggcaacttcttcaaattgggaattctcttcttagaaaaaaaggaatttgtgtagaagagaattcgtcagaattaagcagtggttgtcagattgatgtgggcatgatcagagcaactgtctgtgaatgaagctgcatatgtgcaagtgtagagcctcatgtggcagttgtttttagtccccatactcagttcattttttacctttttcctcagaaatgaaaggtcttcagggtaggataaaagagaccaagatgcagatgagcaagagcccataaaggcacaccttggggcataaggacacttccccattccacaccccaccccaccccctaaactgtcattacttaaaaaaaaaaaagaaagctctttatgcaggctggagtgggcagaggggacagtttgaaataaatctctgcacctcagtgggtatgcagtcattgctgcagtcagtgaaggctgttactgcccttgggaaaaagagaatttgcaatgtgatatttcctttgaggaataaaggaagacagcaacagtgcctatgggagttagaggagggaagcaggcagagaaaaccatttatcagaaagttgagaatatagtttctcatccaaagtaacctcagaagtttttcaagagatttgttgttcaagttcccttggaattataagtctcgatgccaaactaatggtcactttggccctttttaacaactctacttttagtgaaatttttgcatcttaaaaaagacactagtttcttattaaccaattgtgtccccagctagcagttttgcaatatgcagacaggaaagcaagtcccgcaaactgggaacttggaactttagcaacacaggaaatttgaggggtttacaaagaaaagctcacagagtatacaaatataaacagggttaaaattaaacttaccagggagagacactatcactgacttacatgaacctatttcaaagaatgatttataaactagaatttaagcttcagtgtcatataacgacaggagcacagtgttggaaagaacaagacccaggattgacacataatagatatccaattaatatttgataaatgaatgattgagtggatattgggccagccacttaaatcattctgaatctcaaattatccattcatgaagtgggaaataataatacctgttatatcaaataatagtttattgcatgcctattacatcctcatcactgtgctacagtgtatgtgttacatagtgtgtgtgcgtatatacatatgtacatatgtataatcttcacaacatacttctctactttaaaaggagacgattgggtcctcagatgatacatatgaaaatcaattgtgttgtgcacactcatttaggaaaccaaattatggctctgatggttatatttacatagaatttggttagcaaagttaggctagccacaaatgattatttcacccacatcagagtagatggacggacaaattctggacaagtactaacaagtatattccttttgattttggctatgaagtttctaattaattgttataatttcttttagataatttatagtcctatgggacacaggaaagcttctaatacttaggaaggttctagtcatgcctccttaagcatccactctgctttctagatggaaagatccacatattattaggttctatttacaaaccaactcttaagacaacatttcttctacttatagggggaaacttcttttggtcccctaagaaaatacatctgtgtgcctcagtttgagaaaacctgcatcaaaatttgaatgttccctttaagtgattccttgaaataaacacaatcagaagcatgatcaagaacaaaaaattactaaatgttaattaaatatgattatccagatgacccagaatatgcttctattaatgtgtttcagattggcactaaaataaacatgtaaaatttaaaaattgtcatagaactctgagatccttaataacaaaggctatttaaattaagtccttccttcagaatctagtttccccttgtatgtgttaatggtaaccaatttgggcctcagagagtgaatgtctcctgattttgtttccaaagatggatatatttatacctgacttgttcatgcactgacttgcatttgctgacaaaatgtagagtacctgggtgaattaagcaaactcctatttaccttcatactgtacacattattaattagcccatttattgtacaaacattattgaagtgcaccttttttgtgccaggtactatattaggtgtagaggttaccagtattaataaaatttgaccatttctcatgaaaaagaagccttgttgggaagataaacaggaaacacacaaatacaataaattggttaaaagaaccaaattttatgattgctcagaggagaaagtgactaagccagcttgtgtgtctcagacatacctgaaattgataccaaacaccatttataggaattattttataatgatggaaaacagagtaccagggtgttatttagaagactcttcaaagcttttattgtctaatgctccctcctctctcttcccacagagtccagcatgccaaatttggcttatttttaattaaaattataaaaaatgtggagaagatcggaagtcattgtaatgctctaataatattaccaaacttttatattgataccttgaaatatagacttggtttctagcacaatgtttagcaaacaataaatagtcaacaaatgttttagtatgtgaatacttgaatttagttactatttattgaatttaagctatccctagtctattaatttgaaaactctgtatcatgttttatccgagtttagtattttgttcaaaaatatttctttacttgtgcctcattagaagcaggaggatagggcacacactggaatctgctgtggaatttctttagttctagcctccctttttgcttcctttccttcgaggtcctgccacctctttcttctcaattccgatgtcaccgttggtgcctggaggcatctccacttctggctgtctcactagagaattctcttgtttcatggtacatactccttcccctgcttgccaaccttgataaattctatgtcagtaggagaaagttcaggtttttaatgccctcttttaagatgggttcattgaaatgttaaatgagtcagtgataaacatgcagaactaagacctagtcttttggattgtatctttaaaaacttctagaaattatactcttattacttgtcatctgatcttagaaacacagaattttgttattacttgtcatctgatcttagaaacacagaattttgttactgtaaaaaaaaacttaagggagaaaccattctaaaccctttgctccatttttacttagcatttacttttatttatttatttatctatttatttacttattttgaggcaaggggtttgctctgtcacccaggctggagtgcagcctcagcttcccaagtagctgagattacaggtgcacaccactgagtcaggctaattttttagttttcattttttgtagagacagggctctctatgttgccaaggctggtcttgaactgctgggctcaagcaatcctcccgcctcggcctcccaaagtgctcggattataagcgtgagccactgtgcctgcctagaattcacttttaaatgctgagcttggcatgcatttgacaccataacattctacaattcattttaatgtttttttttttctaattttgatgtatttggacattaaatatctacaaacctaaaagaaataatttttagagactgagatattttctattaaaaaatagagctaatgagaagttgaggtctaaagaaaataaaataggattatgatgcagaggccattggtttttgtgttacggaggccagggaggtgaaaaggggaggaggtttaaaagtgcagtttctgagccagaatcaccaggtagttgataactcagaatgttcagttcaggattatatgaattaatgcaattaagcacttagaacagaacctgacacagaagaataaactctgatacattttagctattatttaaatgatttgccactcacttttaaatttaatttttacattcctttaaaccatgactattataataagtagttcagataatttttcttctttgagccttatagaaatgttttcttcttatacatgttaagccaactactaaagaaataatttacctatgtaatcttataaaaattaatttaaccaaagaaatgagagaccacatgaaaatggcatttacataggagagttgaggctgggtatggtggttcacgcctataatcccagcactttgggaggccgaggtgggaggatcacctgaggtcaggagtttgagaccatcctggccaacagggtgaaaccccgtctctactaaaaataccaaaaaaattagccaggtgtggtggcatgtgcctgtaataccaactactcgggagacggaggcaggagaatcgcttgaacctgggaggcggaggttgcacgatgagttgagattgcaccactgcattccaacctggacaacaagagcaaaattccatctcaaaaaattaaatgaataaataaataaatagagttgaaatgttcagtagtaaaattgcaactctttaaattattgacaagggtgactactaataaaccaagctccttttacccatctacttcctaggttttattgtaattcaaaatacttaaaaaaatacatcacttttgcatacgttaatacttttgctagcctacgtaaacgtatgttgaactcaaaaatgctcaattcatctcatcacatttagccaaatcttagtgatggaacattggcagggctgtggatggggagagcaggaatatatacatgtattactgtttgcatgtaactgggaaataataataccttacatttgttttttacttcacaaattacaaacagaattaacctacattgtttgatactcttaaataactatctgaggtaggcaaagtaggacatttcccttttttactattgaagaaaccttaaatcctattgtttaggactggagagacagcacgggagctcagatttccttttgccctgtgcccgtgttcttcactctgccaccgtccctctcagaaccccaaatgtggacacgatttagccaatattctcaaaatgaagaattctgcttcatcccattgtcagtccttttatttgcatcacaacacccatctaaaatgaaaattaagttcagaaaactcaaataagtctaccaacaaaaccatttcttttcttttttaaaaaattttactttaagttctgggatacatgtgctgaatgtgccggtttgttacgtaggtatacgtgtgctatggtggtttgccgcatctatcaacctgtcatccaggtccaacaaaaccatttctaaatgtccattatcctcccttaaagtgatttttgtgagtgccaatgttttatttatttgatctaaaaggacatctaacttccccaagatgacctcctgtctcaggtcttgactaaacttcttttttgcaatccagagcatgcctgcatgtgcacacacacacagacgtgtgtataaaaagtttcaccaaaacccctcaaaatcaacagagtccacccacagtgcactctgtctttctttatgctacttcatgatttgaaccatgctgattagcagtccattagattgaatttatgacccgtttatgcatcgtgacctacagtctgaaatactggtttagcatttaattattttaaataaaaaagcatgggtctggaaatcagatagatctgagtttggattttttgctcttcctcttataagtggtagtgatctttgaggcaaatcacttgacttctgagaattttagtgtcatcatctgtaaagcataataaaatatgctgtaatataatatatgtaaaatgtaaaatataatagtgattcctatgtcattaacatttcttattctttcattcatcaaatatttatttctcagcactcataacctcttcatttttcttgattttagtaagattccgaagaccaatttttacagttttttcttctcccaggcaaatgcactaccatattcagtgtcattctctatattttagggattgcattatttaaaaaaaaaaaaaaaaacaacccttgatggggctagacagggagaaaagatcagtggccaaaaagggagctaccatccggggcgctagacgggactccgctatggatgaagtggagatcctggtgtggactatatagagtgacatcttcaaagtattcttattctagccctttttcactatgaaataatcgataacctgaacagccaaattccagatctcattgtaaatatttttaagttaatgaaggcttagtaaataccacattaaattatcatttgggaatttaaaagaaacccttgaagatctgagaataactaataaaacagatatactcttggatcacctatagtttgatttactttgttaaatcagaaacctgtggagaccagccaaggacacagtcagttcagttaaatgtgtctgacaaagatggcgcattgtgtgctttgcttttcctgatcttcataaaaaactaaatccttaatcccaccgcagtgaataagtacccttggtttagagaagccgctgtggaagagaagggaaaagtgcagataaaagatatatgggcgtaaggactgagaagggatagagaacatgtaaatgtgtcattttcatttttaattggattttttcttcattgtatagattatttcttttgccaatgtcatttatattaatggcacagtgaaactgcagtaatatttcacatctatttgtatctacatttatggcacgtatttcatcttgagaagagttcttggcttgggggaatcttgacactgaagtccattcagagtggtggtgaggactgagaggacaagttgcactttccttcacaattactgcctttggatgtgcccattttctctctatctctttcttctaacctctttcaaaaactttcaagaactcatatattttaattgccttctccaaaatatttacattttcatacaattaaagatgttatataagttagttgtacttttctgatatgcaaaagacagactgtgaaactcttcattcaacatgtgccgtatgcaaagcagggcagacagagatctgaaaattaaatcattgacaatatatgctactgtgtagttgattttcagttgtttaataataagtatttgggggccaaatatttatcgggacaaaaattacataatgtgtcctttacttctcccttagaacctagcactgagagctgagcacttagtgggtacctagcaaatgcttatggattaacaaataaatttgtattaattatgaatttataataaggtgaaaaacagtttgatggatgatgatgcaaacatttaaccttcatgtaagtttagccatatcttcttgaatctgttcctcaacttttccaaatggactcctctgtggtttttctgtatatgtcagaaacactcaaatggttccatgaaaatttttattggctatctgttctacctggggtcatccactagctttatatgatcacagaaaggcagtcaatggggaaagtatttcataaaatcagcaagagaagtagtgaacagagcttattataaatctgattatgaacaaaatgttaaaatattgctttataaaatttgatagaagtgctgaacaaaaaagataactttgttttttaggattgattaatgtgcacatggttgtttcagtgtagcattaccatctttttttaaaatctacctgatatttttagccattttaatggtattatatagaaatagcattattctgaagttgtggtatcaaagatgatatcatgtctggaactcacagatctgcaaagcccaatatcttgctcacaataagagctcaataaatatttgctgattgtttcaaaaaactaagtacatattattttatcaaaattaacttacataaagtcagtatcaatgacttatcaatagtatcctgctttagttgtttcccatttggtatgcagtatatataaaattgagagatatttaaatcattgctagaaatataacctgacacagtgaaactataacctgacacagtgaaactgatagatatgtagaacattgctggcagtgaatctataccttgatgcagcttccccaaattataatgttaaaattattccctcataaatttacatttcagtagaagactgttagatagcacatctctgaactataaatctgatcatattacatatcattgtcatgtcttttgcctctaaatttggagaccctatcaagaatatcaagattgtctttgttctctgactctagcatcataataagatcattttattgactgatttcaattcggtggtcaggaattaacaatgaaatattattattattactattaaatgtcacagtgtaagaaggacagtttctataaccttcatatttagtacaactttttctttttttacattctgagtatgactcacagtcattcttagataagtactcttctataacaatctacataatgtaaataatttctatattccatttcaaaatccaaaaacatttatgattagcttctgagattatttatgaaataacattttgtagcattacttgggtctatatgatatgtgtaaaacagtgtatttcaatttgcatgtgaaaaatgttaaattattcagtatcaatattagaataccgtctgtataagacaagtgggctatggaagctaataattggcaccatgtaccagctgctaaactgtcactttatttccattgctctgtttaagccttactactgtgtcagttgaagactttaatccttgttttgaagatgaagaaactaatatttattctatttttcaggttgaattaatattttcctcttgaaaatttgttcttgatttttaaaatcatattaattttcttctaagttttttccaaattgttggtcagtattttgagtcactgagtagctagttggagtgagttagttataatattaatcaaggtataactgttgtctgtaaatcccaggaggtggggagtacatcttcgtaagtgtgaaaagcgcttagcagagtgctgctttgagatacaaaaggactgaaaaaatataaagctgtacatgtcccagaaagtgtacagaattttattttgtgccagtacaataaatggtataaaattgttctctttaagtcatttaaaaaatttagagatttcttcgtttaaaaaaactgttgaaatgaagttgccaaaatccatgtttctaatgaatacttaccttattgcctctctgaatcaaaaacactgaaattagtctctcttaaattaatagattcaagattctaatgcaaaaaggaaaaaaaagaagagatcagagtctgtctgttctctgggttatatgcttgagtaggatcagggcactattttcctcattacttcacttcttaaagccttgtttgtttcttctctcagaatggactcaacgctctccatctggctgccaaggaaggccacgtggggctggtgcaggagctgctgggaagagggtcctctgtggattctgccactaaggtaacatttatgttggtagaacatttttttccttagaaaagcgaaaataatttaaagcttttcatttttatttattttttagacaaggtctctttctgttgcccaggaagtagtgcagtggtacaatcacggctcaccgaaacctccacctcctgggctcaagtgaccctcccaactcagctgcctgagtagctgagactacaggcgtgcgccaccatgcccagctaattaaaaaaaatttttttagtataaatgaggtcttgctatgttgccttcctgggctctagcgatcctcctgcctcagcctcccaaagtgctgggattataggcgtgaaccaccacacctcacccacttaaagcttcttttccctctcgtacatttcagaggttggctagaacaccaagattcttaacctgcagaattaaaattaaaaccccctccattaaactctgcagagtgaattgtttcatttaaggacttatgggacatcagtctgaaaaatctgtaaacctagtttataaaattttatctttcccccttcgattcacagaggatgagattaacataatcctttgtagacaatagcacctgttttcctacggttaactcattgtttaaaaataaacccatgtgggaaacttctctatggaaaagaacaagtaattttaaatgtatacattcagtttggtatgagactatgcagaatcgtttatactctaataagaaaagagattttgggtcatggattgaattgttagggcaatattagattttatcatcataatgtgtttggtaaggaaattggactcattttaaaagaaatgcacgggacgcttggcaaaccagaaactgttccttgatgctgcttttgctaaaacatatttgaacttgtcgaggattcatttcataaacaacagacatttaaaaaactattatgaatggcaacaatctttgcctttggaaggtaaaattttatttggaaaaatacagtgctaatcagagccaagtctgctgaccaagccttgaatgtgataatatggctgtggaagatgtagagagagaagtcaggcactctggtctctagatgggacactagtctaatctggagtaaacaaacaaacaaaaaagtacaagaataaattaaaaacatggccagttaacgtggatttccaatgcctcatgcataattgacaaaatgtgcattggttctgcttgtagtatagtaaacagcaattctagcagaaattaaaaaacaaaacaaactaacaactggcaattccacagaagtaaacatgtgaattcactatatgcaataaatttcttacttcgaacataaagagggagtaaacatttttataagcatttctctctggcacatcaaatacattttaaacaaatatttaaagaatatctatttgaagcccagtgtgctggctcacatctgtaatcccagctactttggaggctgtagcaagaggagcactcacaggagcctaggagtttgaggctgccactgtacaaccccaccatctattattttttgtctttttagtaatagccattctgactggtatgagatggtgtatagttgcccatgttaatatagtgtattcattaagccaattatttttgcctgcttaagtgtttattactatttttgtttttcttttcttctaaactctgttgatattttaaaaattaggcttacttttaatcatagaattgtagaatttcctggaaaagaatctcacttaaacagaaaaaaactgaagcccccaaatattaagtgagtggctaatgctcccacagtgagctggagacagaaagagaactagagtccaaactttatggcttggaatctactggtttctggtttttttttctttttgttatttattttaatcacatcataggtatttttaatctcttggcctttattttcacaaaaggtttaaattatttttcattggtgttagtgttgtggctggtaaattttgatgtagcaaatggtagaaaatcattggtactgttatgatttatgtaaaatttatttttcttattcccaacatattctcaagtgccccagtagctgcaaacataactataagcagctcgtttctctaccactaaaaattcctaggtttctttgcaaggtgaaagaaactcaatgtttcagtaaacctttttttagttaatatttctttgcaataggattctttagttgttaattaaattgcatgaatctcatgagatattgacacatacacacaccccccacaaatttttgattcattgaaaatacagtcattccgtgttaacactaaaccaatattgtgaaaatagaaaaggaagacactatatgaggtggccaatttttttttttgatggtaaaaaataatctcttcgtaagtgggctactatcttgataaataacaaattttaatcggttaaagtgattagtgaagttgaaaaatgcctgcacattttgatttctgcaaaattcagaaaccttgaacattttctattttgtttctccaaaacagaagggaaataccgctcttcacattgcatctttggctggacaagcagaagttgtcaaagttcttgttaaggaaggagccaatattaatgcacagtctcaggtattccattcagattttccctgatgtacatacatttaaattagaacagttttgtgaaattgatttaatgtgtttagctagctgttctactgataaatttattataagtgctttgttatttattttagccaaataattttattaacctttatgatgaagcttattttttcaacatataatctcccttttaatgtaacttaacactggaaaaatgtaagtctatcattgtctctaagtatttttcaaaagaatataaagtgatttttttcagaatgacagtgacatctgtgaaatatgaattattcatgcaagtttcgtgttactctataaaagtattctctttccgtaaatttaaaatatacttgaaagatttacattccagtggaaaatctgccataaggtgggaataacactactttggtcagtttacacccctaatgtgagctttactaataataaataggaaatgtatggttttaaaatgaaattaagaaaaaattaaacaataattatttaatcaaaattatactataagcttgatccctttttttttctggtggaaaaggggagaaaatgttgttttgcccaaagctttactcttgatatctattatatcatgtacgcatgtggggattgagaaatatatctttataataaaattcattctctctatttttagggttttctcctttgcctttctgataacacagactatatcatggaggatattagcaaaataagccagctctgttccatctattctttgggataacctcaccaggttgcctttgaaggccattgtgtaggaatatgtattaactgtatagttcattcattaattacctaggcatggctctagttctatagatggcacaagttctggacctagaaaatacaaaaggcaatggttaaatcagccctattttctttgattttaattttgggaaaaatctgttgaaattatgatagataagacattatttttatctttgtaatatcatgctattttaattagtcatgtttttttccttacaactcaaaccttcagttggatgcacatcaatgttttaatatgtattgagaatatgccttagtctaaaacccttattagatgaaatttttataatttggtaccatctgtaaagaacatctgtatattttataaagtataacagcattttaggcttggagagaaaggtccctgcagaagctactgctccacctaagtgattcaaaacttttctttttcaaactttattttacttagattcaaggggtacatgtgcacgtttgttacatgggtatattatgtaatcaaatagtgaacattgtacccaataggtaatttttcaaccttcagtcccttctccccctccccacttttagagtccctagtatctattatttccatctttatgtccatgtgaactcattgtttagctctcacttctaaatgagaacatgctgtatttgactttctgtttctgagttatttcatgtaggataatggcccccagctccatccatgttgctgcaaaggatgtaatttcattctcttttatagctgcctagcattccatggtgtatatgtaccacattttctttatcccgtcaaccattgatgaacacttaggttgattccatgactttgctattgtgaataatgctgcaataaacataagggtgcaggtgtcgcatgttctcactcataggtgggaattgaacaatgagaacacatggacacaaggcggggaacatcacacgccggggcctgtcagggggtggggggctaggggagggatagtattaggggaaatacctaatgtagatgacgggttgatgggtgcagcaaaccaatatggtacatgtacacccatgtaacaaacctgcatgttgtgcacatatatcctagaacttaaagtataataataataaacaaaagagtgaaggtgtcgttttgacgtaacgatttcttttcctttgggtaaatacccaaagtggtattgctttgggtatttacccaaagcagtagggggattgctgggtctaatggtagttacgtttttagttttttgagctatcccaatgctggaaaacctttctttatatcaagagaacatctttttgctttagacagaggttttcaaactttagtctgcatcataaccacctgcacggcttgttgaaacccatgtttctaggctcctccccagggtttctgattcagttctggagtggagctgggcaattttcattttttacaagttctcagatgatgctaatgctactagtccagggaccacatttctgaactatggctttagcaaatgtgaggggaaactgggtgtaagatattgcagtaagattcacaaggtatagattcaactacatgactgaatcaataatgtacttatacatcatgaaaatgaaagcctggttaaattcaattgttcagtggaggttctcctgactttgacaggaaattcacctatacattggtgctgttaaaatctgtgaaaagaccatattttactttcctcaaaatgacaaacatagtgttgttataaaagttgactagtagcaaatgctgcaaggtaaatgcttgttaaagctgtgataccagttattacacagtagttattggaaatgtatatgctttggaggcttctcacggagaacaagctaaaaccatttaatcattaactcgctttcagagtcagaggcttttatttataaggtataatcatgccaaattataacagatcttaaaagaagggttgtatcattattaagacgttaaaataatcctatttgtaatttatactattaggtcaatttaagatttatattgcaggggattctgacaaatagcttcaaactaacattcatattgtgcgaaagttttagaggaagaaaaactagtaatcaaattttagaatcttttctaaatgtttttctaagtcttttgataaggcctatgacattatttcctgtattgaatttatgtacccatcattaatagttgaaaaaaagtattattacttagaatattttataatataatgattaaaattaaaatacatgagggttgattattttaccccctgtgtgtgagccaatcccaaaactgatggtttcagagccactgagggctgatttgagttcctccacagatgttatttccctcagtactgtcttatgtaagatacaggattctttatgtgacaatatggggtgtcaagtggatggatgggagacttgcttatggcagttaaacaatctcttccttttgagaaccagaaaaaggacgtagggaatcctgaatgtacaacaaaatgtctgaattttgtattcaagtgataccttcttccacatctttctaagaacataatttaaaccactgaaatgcagaatagtctgaaattataggaacattggcagctgcctagtactatgcctttggcaaacttccgagttatttgcaaacagactgctaaagttatttttgaattaagaagataacaaattttctgaaaaaaccttcaaggaatatattcagtaaaatttttggaattataggttatggggaaatacacacttacggatttttctgcattttgcatataaagtatgagattcatgtgaggcttaccgccacatgatacagtaccaattttggtagagagtgtccttggttcattaagagttccagaacaccagctggatcaacttcagtactttaaatggtatagtgtaattgatttagtaacaatgaacaaatgtttatttttgtttctttgttcaacagtggtatcagtgtggtctctgctgagccagttcttggtgtgattttaagtattgcccctgaccatgtagctctctggcttggttctttggtatcctagattcagtgacatggaggtctcatccatggtgccggaattatggagttagaagtcaaaatcatagagttgaggaatgttatttgctttgaagatgattttttgctttctgaaaacaaagtcacttgcagaagatctttagtaggcatcttatcctctaaataatcctacatacgtgatgttgggatgatttccatttaagctgtatgggacatttgtttggtcacttttataacctgtaagtctgttagactcagagacattacttttaaaaaaatgttcaaatttcaaattctatattgctatcaaagaaactctacttagaaagtttttaaaaaatattctcaaaatcatgagtttctttaaatacttgtagcactctttgttgacattttgcctattgatatttgcctatctctgattgcaaaaaaaaaaaaatacatctttaatttctccaagatggtaaacttcttgggagcagataattttttctcacacttctttatagtttcaggattatgcataataccttgcacatatatgattggaggatgaatatatgcatgtatactctttatgtataagtcttagctttgttgtgtattccaataactcctaacagtagacattaatattaataataatacaggtaataacattgactgccaggcattgtctctagtgtgttgtgtacattatctcttttgatattcctttactttatcattattgatgacaaattgagactcaggtggctcatttacttgcccataatcttcatccccaggcaatattgcttctcatagttcccgtaacagttctaccttctctacagacctcaaagaataatttttaaaattcctttttcttctagcccaaatcctattcaggtccaaataagctgattttcttaaagtagaatccatgtaaaaggtttaagatggaatttctcacttaatattttttatgaactataaatgtcctgcaaaatgttcaaaaaatgaaggatattctgctgttaccaccaaggaaatctggctttagaatttcccccttattattttctccacaaaaaaaatataatttttagttctcatataagagaattttttctttagatacttattattaatatattctctaattataaaatcattaaaatcggaaggagcactctaaataaagcaaaattgtcttaaaaatgttttttattattacaaagcaaattggtttatataatgtatatttttacatgataaaaaaggtaaactggatcctagactagacaccatcatcaaacatgagaagctaagcaaaattttggagaatgggtatggtaaatttcccttccttttaggaaaatatgacttttttatagaagaagggaagggctagaagttctcatgaggctcctcaagaagtttgtgtctggggcggtcagtctgccttggagcaaattccagtgtcactaaactacagcccagtaataatatcttgcattcagacccttaattttaaattgtatttttatttatttaatctcatttataattatgtgaatcaacaatgaatagtctcattttggacatggaaaaatttgaggcataggtaggaaaaccaaagtctcataacaattagtgatgaagccacaaacctgtggtcattggtacggacaccttccttccaaataatcctaggcatacctcagtctttcccactaaactgttgtacaccttctacttgaattagggaagtccaaaaccctgcttgcctaggcgcttagatgctgctataactaagagccttccgcaaagctaggcaactagtgagtaaagcgattcaggtgtactgggagggcgtatccataatctgggcttcatacaaccatccacctcttagactgttcttcaatcaaacaaaatttttaacatgtgtaagacttggccgggtgcagtggctcacgcctgtaatcccagcactttgggaggccgagacgggcggatcacgaggtcaggagatcgagaccattctggctaacacggtgaaaccccgtctctactaaaaatacaaaaaaattagctgggcgtagtggcgggctcctgtagtcccagctacttgggaggctgaggcaggagaatggcgtgaacccgggaggcggagcttgcagtgagccgacatcacgccactgcactccagtctgggcgacagagcaagactccgtctcaaaaaaaaaaaaaaaaaaaaaagacttaaatataatttctgaaattggtgatgtccttttcaattcatttttcttatctgtctctacattcttctacttgttcttggaatttcttgtttctgtcctctcataaggattctagaaacagatttgttttcttttcatcttattttaatatcaagtgagttcaaataagatgttcttacttggcatttttgatatctcactgaaaatttatttccatttttattggttatttttgcctgttttgtgattaatactcttttctttcaatcctgaaaatattgtttcaaaagaaggctttcctatttataactcaaggatgattaggtgattattttattagcttttggatttctacagaccacgactattaattccagttgtaagattatatcaccattggttacacccccagatttatgggggtgcatgcacccactatatgcaatgataaatgtcttttcagttgtggcttccaatagttttttcttcattggccctaacccattgtcacagacaatggaattgaactgtgaagaggaaggaaacacacacagttggtcagcatgcccattaccttgaattgcttccatatggtcttagagccatccttggctctgaaagcaaaaacttgtaatggaacattctgttctgtgacatatgcacagagacacacacatacatggatgcacacatatgcacacacacacatacacacacagtgtataaagtgggatctatagtcacagatttttttaaacaggttttattttcagggttttcccccaaaatatatgcatatggttcttttttcctcttttttaaaatttaatttaaatttattttaagttccaggatacatgtgcagaacatgcaggtttgttacacaggtaaacatgtgccatggtggtttgctgcacctattaacccatcacctaggtattaagcccaaaatgcattagttagttttcctgatgctctctctccccctgccccctgacaggccccagtgtgtgttgttcccctccctgtgtccatgcattctcattattcagctctcacttataagtgggaacatatgtttagttttctattcatgtgttagtttgctgagaataatagcttccagctccgtccatgttcccgcaaaggacatgatcttattcctttttatggctgcatagtatcccatggtgtatctttcttaataagggtcttgtttttttttccattgggagtattactatctgtaatacaaatcctttgaaattcaaatgaaggcaggtacttgcatttgacaaggaataaaaaagaagtcaggacacttgtgtttttgactctgaaaatcaggccactgggtgattacaaatttgcaggggcatctgtgctcctcagcactccaagttaaagaaaatatgctttttccagttctctatatgcttgggaaaaagatgagaatcgatgtctttaaagttttgcccaggctgggtgcggtgactcatgcctgtaatcccagcactttgggagactgaggtgggtggatcacttaaggtcaggagttcgagaccagcctgaccaacatggtgaaactgcatctgtactaaaaatacaaaaattagctgggcttggtggtgggtgcttgtaaccccagctactcaggaggctgaggcaggggaatcatttgaacctgggaggcagaggttgcagtgagctgagatcgctgcactgcaccccagcctgggcaacagagtgagactccatctcaaaaaaaaattgccaagaaagacattactattctctattccagtaaaaagccaacactaaaattactactctacaaagcgtgcacacgcacacacacacacacactcccacatcctaaaagacaataatattttcatttataataaagtaatttttcaacttttgaaataaaattaatacaattatattttgcctttatgctcatttatctggggacagatggtatggaaaggctgaatcctgcttgtcattttattctgaaatttgaatgaataatcgaagacatcatcacatctaaaatcttcggtagatgtctcatttatttatcactacacaggcctatccaagtccaatgttattgcattttaaaggaactaaatttgtagtcagttaagacttgtagggagaaaagtaaatggtctccaagttctgttaatagaaatagacttcaaattttacataagagttacttctttttctccccttctgagttaaaatgaaagataagctactctggtagtaaatggttaaaatagtactgtagcattctgcttcttacctcaaatctaacagcattaatgtgtatattccacaacaactaagaagctaggtgaaaccatcaagaaccaaaatggtgatcctttgaggcaaggatcacaaagcaaaaaaaaaaaaaaaaaaaagaagaagtaaaaacatgacacgaattaaactttccaatagaaactgattggaagtaataattcacgcactcactcactcagcaggtatttgggcatccagtgtgtgccctcgaacacttgctaagcctacaatgatgaggtgggcagggggcatgcggaagaagacctaggaagtggtaactgaacttcttttataaaagaaagtgttaatgcgcacatcagcggtcaggggatgaagtgtgctatgggcaaatacaatcatacatgcaagaacctaaaagaaatgggctatctggaagctgaaacatccaggggaaatgcagtgtatgaaatgaagcctgaggaagaaagtcagatcctgaaagattttatgagccatattaaggttttcgttctaagacttgtatcctaagcccaatatgaagctggcttgggggtggaacaagctcaggattctgttttggattctgaaaacatgaccctggtgcagcttggagaacaagtcgaagggagtcaggtgcaatgcaaagcaaatcatttggagaccgttgtcatgatctactccatataagaggtgatgttagcttggaatggagtagtagtggtctggatgatggagaaaaggggactgttataagactgattaaggaccagtttcagagcacttgatgatgatggcctatgggaggagaggaagacgatagtgtcaatagatctctcccttgcctaacagtatagatggtaatgcaacactataatataaaacagtgcataaagacaaagatttgtttgtttattttattttattttttttgagatggaatctcactctgtcacccaagctggagtgcagtggcatgatatagctcactgcagtctcaaactcccaggctcaagcaaccctcctacctcagctttctgagtagctaggactacaaacatgcaccaacatgctgaactaattttttaaatgttttgtagagacagggtcttgctatctcgcccagactggccttgaactcctgggttcaagcagtccttccacctccacctcccaaagtgctgggattataggcatgagccactttgtttctggttttgtttttggttttggtgaggagagtaagagatcatgaatagcatttgaactgcttgttatacatccctaaaagaaatataagtggttattacatcatttgatgtaaatggttattaaagcagtggactcgaatgagactgccggagcagtaaagacagtgaagaggcaaagggcatacttccccttcatcctctgaaggctggctaaaaatcaactaacagaaaggcagattaataggagaaaaggaatacaaatggattaacatacatgggagccatacaaaactataacaactcaaataaatggccagatgattgacacttttataccattttgaggatacagaaagaataggggcctggagcatggcaaaacaagttatgggagggggagaaggcgaggtctagctaacaaaggaggtcttgctatatagatgaaacctcaccagtagtagtagcccttggagaaaatagatggtgaatgtttctttcagacctttgaagatgtcagactctcagttcactttttctagatccagacaagggagggcccacagagaaagcctggctgcatcaatgcagattctctacagatgcaaatctcccccacaggacagctttgcagggctacttctttttgtaggccctctgaacggccatctcaaaatatgtcaaagaagaatatttgttatcgaaccaaactggggcccactcgccctgtatagcaataccagatatccacaccaaggttttcagcgggagaaaggaaggtgtttattggcagggtgcctaacaaggaggatcaggcagctcatgcttaaatcctgacctccctgatggcttgcaggtaaagatttttaaaggcgggggtaaatttcagaaagcagaagttacaggcaaaattgtaaatcaaaacatggaggttccacattggttttggcctaaaaggtcagagtatcttgaagcggaggacttacaggtcacagattttctgatttgcagttgggtaaggaagagaagctttgtttaaaaatgtagggtcagcagaaaagaatgttagcctgggttcatgggcatgacttttttcaggcccctcaggaggaagtgtaaaacaaagaatgttggccagagttcagtcctccgttcccccttaccaggggcttctgtgccagcagatctatttggtgggggtctgggtttctgagacagaactcagagacatatgttaagatgttagcttttgtgcctataggggaaccaaacatcttgtgattctagcttccttggctgctattaccttcttgctcatcaagtttcttatttacttctcagggttagctacatgcctggaattccccttgaaggaactcaagattttcctttatttctatgcttggggagcctgcaggtccctaagaggggatccctgctctgtcttctattttggggataaaatattttggtttcctttaccagcaagagatagaagagggtttatgttttagggacaattttcacattgaagaaaataagatgaagaaaatttgaggcatatgtcaaaaaaactgaaaaagttataataattgaccagaggactttgggtccttagtataaaatgagtaaaaagtagcaggcttggaagaattaaaatgagagctaatcaagtccagtgatatcagcatttgatttaaacctggactgtcttcagtttagcactggttagaagcaagaatccagagtcagataaactagatttaagtactgcttccatcactcactagccttgtgaccttggacaagttatctcccatttctgtgcttcaatttgcttatctgtaaaacaggtaaggaataattacagtacataaaattgagtttttgtgagggttgaaagaaataattatgtaaaacgcttaacacaatccttagcatataggggcactctacgttagttgctgttgttatatttattattttcattgttagcttcatgagcatgggaaggctattatactacctttgtgggaagcacgagatcagtttttgttggttctttaggtcctgaattactttccctccctatttattagatttattgattcttaggaataagaggacaaggaaatctaaattcattcaaataattcaaatctaaatttgcattcaaataaagaatattgcactcaaataaagaatatcagaaagaagcagaggagagcagtggaaataagtattgctcaacaaaatctataaggactgttgatagaaacctggtaacttaactgatggagaagagagatgaagaataaaccaaattctatacattcaactgtatcaagatagtcagatcagagatttggaacttctattcacagacaattataatctgccagactaggaaaggattcttgcatcaatgtgagcacaatgtatcgagctaatgataatttgtgcatcattcttgttcataactcactaacatttgacaattggaccaggtgcaaaggcttgagaggtggcagctcttttccttctttcacgtaatgtgccattgattaataatcaaacagcttgcattttggagtaagtctccacagacaacatcatctaagatggatgttttggtgttcttcctatttcttgaagttttttttagaaagatctcaaccttctaggttagcattgtgcattgtgttttgaccaaaaattgtggaagcaataaaatgtagatagtgttttaactattttgaagacaacttttccgtaaacaaatgcaaatattttgctttacttggggggtgtgagagcctcttacattcttcacatattatactcttaactaaatcacttcagtgtataactggaaggggctattagagacattgtgtccataacacttattacaggaatttgaaattcacagggtcaagtgtctcatccaaatttgtgtcttctgatatctggctaaatactccatatgtttgtaacatgaatatattctattttaagcaatcaaaacaatgcaaaagtatatggagaacaaacctaattctccattcccaactttcaagtacaatggcctttctcagaagtattttttttgttcctttctatacagttaaattctctttatgctatattatcttgctttataaacaattacatctttactgctccttaatggagttctccagttatatatgtctaaaatcctgaaaagcgtgacaatatttattgacaatattttattacagcttaatacataatttgcatagatgtcaggcattgctttcttcattttatacagaggaaactgagagtttaggtaactgcctatgtaccaaaagtgatttgatttaaaccccaaactttgattaattacataatcattcttgaaagatgaaaattgtaatctgtattatatcttatttttttcaaagttttcatatttggtgcaattactaataactttttttcagatattattctttagtgtttatttcctttcttaattgggaagatatgcaaagcccagtaattgactaaacatggtaaatataaatttgaatgcatgtacaatacagttagctatagctattaatacctatctatgtgtaataattggaatcctctggttatttctactctttatttctactcttaaagctatgaagaagaagtttttaagactttaaaatggccagcgatctcttttgacattgactgaggtaggcagcatagtgaaatggataagaacgcaaattctgaagctaggtggtcaaatcccagaggtcaaatttcagctcttctgctttctactcatgtaactcatgagctattctgctttctactcatgtaaatgtgtctcagagttctcatctgtgatagggggatcataataacagtaccttcagcaaacagttgttgtgagattaatccatgttcggcatttagaacaatgcctggcaattctaagagctcaatgactgttagctgtcattgttaccaaattcagcactagtgcagccatgcaagaccagccattctgtatgcccactgctgccttttcttggcacaatgaagaacataacaaagtcagtttgtgtgactggcttgtttcacaacctccttagaacactgtcaatttgagtatatgaaattgcattcacctaaacacaatgcctaaagacccttaagtaatttaattgttaaaacacttatagtatagacattgatctcctactgagacttgaagcttcaagctaatgggaaaaagaatgaagattctcatcttagatagtctggatggtgaaaatagaagtccaactaacaaaatgtgttttaaccaaatattatttttgaaaatcactttcagaaggtaattctaagtctggaaaattctaaatggaatatcacaaacctaaaatgtattgtgtttacatttgcttgtgtcataatagtaaaatgatttttgaagtgtctataatataatataccttagaacaaagtatcagtgaagctaaagtcacaagtttaaaaatgtgaagaaccaattttaagctgctatttaaaagatatctaatgttcttgattatatgggctaggtttctataaatgtaaagttccatgcaacacctgctatttgggcaaatactatgtgggcagctgtctcaaatataagtcttgagaagggctaataggtcatacttttatgggtcagtgtagtgttcccctataatataaatctttgattcaatattttaatattcaagtgattcattaatatatgcaaataatttacattgatttaatttaaattttaatctgcaaatatgccctctggaatcagcccgatattcctagttggctagttttaaaattttaaaattaattccagattaaatagatcaatagattaaatgttaataattgttgaaaagcatccaactaggaatatcaggttctttgcagaggaaacgttccaaaaaccactgcaaacatcagtattctcattaaaggcagtaacaagaaaaggattcctgtttgcgatactatttgacattgcaatcaatccctagccagtgcaatgaaaagagaaagagaactatgaatataaatggaaaaagaaacgacaaaatgctgttttatttattttttttttttattttttttttaagtacaatttccattttatttttctccagagaatagcctgtcttcagtctttaagaactcagctccttacatgggctttggtgggggacgtggggcagcacccgcaggtctaaatcggggtgggggtgttcggtccttgcgggcttcacgagatcgattcctgactactttgctgtgaattgcacaactcacacagtaatgtagcttcacatacagcttgggaagcacataggcatcgaagacgctcgcttcagaaatgtccctgactgctgcggcctccactatgtttcgaatgacgaatttcttaatggccttgtccttgggcacgcatcgggcacagttagtgcagcgaataggctgcacgtggccgcggccctttttggcacgaccattgttccttcttttctttgtcatcttggaggcacggaccggagagaggagccaaaatgctgttttatacagaagttatgattatttaaataaacaatctggaaaaatctacaaatcaattaataaaatatttattacattcattaatttattaagagcctgttgcttataatattcaataccatgaatcacagaattgttttgtcatggtatttgactaatattttcttcagcctaaaggttgacatgaatcattctgtaaaaaatttattactaagagtattaagcagcaagtttttatgtatgagcatggtaggttaggactttaaatatcctatctgaaattagactcgtgaggcaaaggtcaaggcatcagagggtgcttgcatgactaacttcaactatattttttattcttttcaaatcactgggaaatttttgtgtaataattttgaaatgccatgaaatcatatcactgtgaaagtacacatcatttcacttacaaaaagtggccctttagaatggtggatttgcaggaatcaaaacacatgtgaaccaacaatgtcatcaaaagacatttattaactattttattgtacaggagactctcctgtatgttgtctgaacataactgggtacaatcttttaaatcataccccttaaaaatgttatgtttaaataacatattaactggaagacatgaatagcaggaaacatacataatataataaaaccttcacattaaaataaaaaacaacatgggagagcaaaataaagacattactaagtgaggtaaatgcaggagcagggcaaatcccactctacttctgaacaggagaggaaaggcaatgaaatatgtttcattaatccactatttgtgtgaccttgggcttattacttaacctcttagcgactccattccccatctgtaaagaagggataatagtatttactacagagggttgatatagagattaaatgggttagtacacttataatgcatgtaataagtgcaatataaatgttagccacttttctaatcattagatatatttgtattatctacttaagttattgaagaaataaattgactggagttgagaacaatattgcccaaaatggctaattctccattgagactgagagattactattttctggagtggggagtggagaaaagattgtacagaagtttcatcttttgtgattagcagcatattaactttaccttggtataacatagttttggaacacagggcctgaatgtgaataattagaaaaagcatttgctacaaacagccagaaaaaaatgaatatattcattaactatataccatatgccaagcactgttctagctctgagaatgcaacaatacagtctttgctttgctttcttaacttttggtagttaaacagttaaactaaaaacacaaaaacaaaaacaaaaaaacccactttttttcttgtgttatcttcatctacaatttttctatcttctattattttatcataactaatatttttaattccagtatttacttaacaaatttatttatacacaacttaataaggaaaggtattatttgtctcttcttatacatgaaaagcacattttgaaggctgaaaataaaggattatctgcttagaaagagccttttttcccaactgttaaatcgggctactctgtcatcattttcttgtggtatttcaagtttcagattctaaatcttccaccttacactaggagcaagcatttctggcataactatttcatcactaatatttatcatcatctttcaattgactgagaaaatgactaaaacagtataaatcttcataaattatttggcagtttattgttacctcctgattttatagtcaagaactgtttgaggccaagctacagaatactctcagcaacctcagacaataaacactttctcgaagcctatgcgtagcacagtttataatgccaggaaggggaagcactatatattgacatatctcattctaattttagacttttaaaggtgcttacatctaaacaccctgattctttacttagaagaattggtgaatactcacttgccatagctaaaagaaagataaggaggtaagaatcctgttgattgccaatgaaatgccttatgaaggcaattaggcctgttagggcatcatcttttgaaagcacaataataaatatcatttcagaggccaaaataattattgttttgtgcagtcttgctccagtaaacacatctaacagatcatccttatcagtttttgggggtacattttgaagccaatatacccaggaagaacaacactcagaacatatttttgtttaaaatctggctctgaacacaagtataacgagtgggcagagcatacttaggtccttttaagtaagagctttgaggagcaacaccttcccttaaagttattggggcccaatttgtagcttttgtactttgggatcaagaattttatccatccagatttttaaggcagttcaaacactatttttttttttaaaggaaaggcttgctatagaacgtctttgttggaatgaggcagcttctgtgtcagtaagggtacatcacactctacaattttcacgatttgcatgaatcaaccttgccacatcatatgctaatcagagcttattcctctgatgaaaacttaccttcatttaatagtgattcttccctcgacacatatgagaattcttccaaagaacagccaccggtacactagacagccaactgtgtgttctctgtcctttgtatgaaatcatcattctagatggccaaaaacaaaaagcaagttctcctttatcaaaatatgagaactcccatctctatcacatttcccttttttctgtggctgccaaaagcccaagtgttcaattattgtacctcgttcattctgagttctggttaccaccactagaggactacaactaaagtttgttcggggttgcacttatagccctatcttgactgtagatatatattttaaccatatatatataaagtgtttcaagtagccttaaatttttgaatgtgaatgtatttcaaggtataaattataactaaatactccaaagcagcggttgccaaggaccgattttgttgaagacattttatccatgagcagcggatggtttcaggatgaagccgttctgcctcaaatcatcaggcataagattctcataaggggtgcgcaacctagatccctttcacaggcagttcatgagagggttcgtgcacctgtgagaatctaatgccatctctgatctgacaggaggtggagctcaggcggtaatgctcactcgccgcctctcccccgccccgactcaccttctgctgtgcggcccagtttcagtaccggttcatggcctgggggatggggacactaagtctcggtaccgaactgaatggttccatgtgttgtctacgtgaggttttgagtcaatgcgttgaagatgtttattctttgaggttttatctttggcaagttgtgaattagaatttgttaagcagctgctaaatattgagtatatcactttttgtgtagtgtaattgtcttctccatctcagcactgtctgggcacactgcctgctctaactgcctagcagcttttaaagaccttggataagggtaagtcagcacagataaaaacccacacttagtaatggacaagatctatagtaagactttcattgtgcttaaattgctctgttgttcaaacattataaaacctatttataaccccttgttctaatgctctaacctttactggtaaaatacatgtaatatgatatgaaacaagactttgattattttcaaaactgttaataccagacatggagtgagaatagcattataattctgacgactgttgagaaaacacagcaactattttagaatcaaaaaaatgaacctttttctttggaaaattttttaaaatttggaatccccttggaatgtgtcagtatatttgtgtcagaatgcatgttttaatttttgaattgccctgcaaagttaattgtcagtttaacagtaatcattaaatgaccaaaaaaaaaaaaaaatgactgacattgatgaagaaagcaataacttcatttgattggagatttagatttcctgggtgtatatctcaggcgataaaaagtgctatactgctaccatctatatttattaacaaagccaagtctactagctgcagttgacaggagtataggaaatgtgactttagatgagttggtctaaccatatcatatagtgttttgatgttaggtgtgtttttaaaaacttggagcagcattttattttctcaaagacagttaagtagaaataagaaaactatttggtagtcattcatttaaataattttggggggtgtaatgcatgagagaagtaaaagagttatggcttattctaagtggtttaatctagaaagtcattttttatttttattatattgaatcaaccttaaaatggtagaacaataaccagttaagttaatactgtagcttaatgcaaaataattacttcaggttaatggattttgctctgttgggggaaaataaaagcaccctatagcgattgttattgacttaattttctcaatgccataggcctatacaaagtagtcagcatttttgcttttggaggtaacacattttctcttgcttctaagttactaggtcatgtattaaattgctcaatatacctattttaatgcactggctacatgctgagcaaattatactacatactgaagatctgaatctagtaatctatgttgttagacaatttgaaagtctagaaaagtttctttaaggaaatctaccagggaattaatttctacccaatttcaatattcaaatatttattaactttacactaaaatttcttctctgacatttagacattttcattacttttataacaaattgggtacaacaactgtaaaatttaatttttattatttaaattaattatgcatataaaaataaaggcatttatatattattataaaattttatgtgatatggtgagcagcacttaatctaaaataaacttaatatttctattgacaacttaaataaaagcattatacattacaaaaaacaatgaagaaaagcctactgctgtgtatcttattttgtgttttcccctcacacagaaaaagtatttttaaaatctcatcacttgcaagagcagatttactttcttactgaaaatgatccacctgcttttttgtagtttaacctcatacttgaaaatctattttagattttctctgcagatgatgtgtctcagggtcactaaataatatattttaaccataataatgttaaattatgtttttcttactattatttctgtgacgtgttttatgatactcttcagatttcctggaaaatgctcccttataaactaatggcagtggtacaaactatattttggtatataccagactaggatataccaactaggataccttcaatcacaaataagaaaaacagctcctcattagataaacaacaaaaagggggttttcttggctttcataaataaaaaatgtaaatgggtataatgagctctaagattgcctcctgcccatctggtggctcattcataaccaaggactcagaattgtttttttcctctttgctataatttctacagtgccagtttatcctcacctggctttccttgtggtcctaggatcggaaccacacattttcttgttcagactcaaaagaagggaacatgtctgtcctagctttccaaaagagaattcgagtttggtggattgaaccagcttaattctcttgctcaaacttaaaccagcattaccaagagaatgtaatctgctgattggcttaagtcatttgataacctgtctgggcctaggagataaggagagaagttcagctttattgtaattatgtgaatcttactggaattatatggggaaacataggtactctaatgaaaaaccaggatacttccaagaaagaaggaggatcctgggtaggcacctacaaatacccacttctatagcttggatattccatttttaaaaagttgtatgttttgtttttttaaaaaatttatttgttttctttttaaatttgtttactttctctatgatttttaaaatattcatttgctttcttattttttgtttggaaatccaaagacataaaaaacagaattattccatcatagcttaacagtttagcaaggtctttgttcatttttgcaaagtgaaacagagagagaaaaatgttttggagttatgtgagagtaaataaagcattactagccatctcaacttttctgtagaatggggtgatggtaattcagctattaaattcaaatgttgaataaaggagaaaaacacaaatctaagtcatctataattgtcaggaactaaggaaaataaggctaaaagtaaacttttagtcaatcaacagctatttattggacacttactatgttctcagcacaatgctgatttctatggaggattccaatcaagtgtaagagaagaagctgctttcacgaagtgtataggctacacacaaagtcaaggtgaacacacaagaaacaaaggcaagcaacagaagacactcttggtactaaattatatggaatagactgtgtactagagaggaagatttggaatagcctagattttgttaacgaaaaactcacagaggactggagccaggcattgactcgtagataaggtctgcagacaggaaaatgcaaaggaagactttgcagatgggaagattagtaacaacaacgtgaggaggtagaattgagcatgtgagtgtagaaatagtggtgagacaagttggtctggagcaacatcacaatatgtattaaaggtttgttttcattataacttactgagtaaaatggggcaaggatataaaaggtcttgatgttcagttattgtctatgaaaactgatctccagggctgggcgcggtggctcacatctgcaataccagcactttgggaggctgaggtgggcaggtcacttgaggtcaggagtttgagaccatcctggccaacatggtgaaaccctgtctctactgaaaatacaaaaattagcaggcatggtggcacaggcctgtaatcccagctactcaagaggctgaggcaggagaatcgcttgaacccgggaggcggaggttccagtgagccgagatcgtgccactgcactccagcctgggggacagagtgagactccacttcaaaaaaaaaaaaagagaaaactgatctccagtcacagtcagtaaaatgacaatgtagataagtagtttgttgaaaatagattttaagaagattaattcaggttgctgtataggatgcactggaatgagtaactggaaacatgcaaaatagttcaaatgctttcttggtaatttatccatgagaagctgaaagcagggatcatggtagacccagagagaatacagtattttctttctgtttgctggcaataaccagacatggtataatatcatctgtggaatttgctgttaaaacacatggcagaatagtgtagttgaaagaacatgaattttggaattagttaaacatgggttcgaatcccagctccatgttttaagtaatgtgaaacttcaggcatgcttcttaatccctgtgaatgctaatttccttgagtcatataaagatacagtatttgtttcaatggactgctggcattaaataacgaatgtaaagtgcttagacttctctcttcttactaacaccacccaaatttcttacccactggaaataaaaactggaagaattcctatgtctaagaaaacatttgaacattcttcatcaagcaggtcatagaaattccataatgtcacaaggcagagctttccagctcatccctagtaaatggcttaggtgaaagtaaaaggaagttaattgtccaattgctagataaaagtacaggtgttctctgaaacaattttttttttttttttttttttggcaacagggtcttgctttctcattcaggctggagtgcagtggtgcaacctcggctcaccgcaacctctgcttccttggtttcagcaattatcctgcctcagcctttttgagtctgaggcagtttgatccttattgaaaagggcagctgagggagtaaaaagagtactgagtttggatccctttagggttcagatcttggtctcaccacttggtgtctccttgggtggataactgtgagccacagtctcattcgtaaaaggagcctaatagcatagttgtggatataaaacaggatgacacagtaaacacttgataaaacttaacctccccagaaagatttaggacattagtcattttaatgtcattggatagtttaactatgaactaatcttttaatcatctttggagagaggaaagtagttaaaataatttataatatcctaaccctggctaagaattgtcaacttcagattatctgagaaaatgtatatgatactttaattaataggatgccttcttaactattaatactaaacaagtatataatcatatattttgtccttttcccttaaatgctcccccagagtacacaaagtagtctttatttttgtgactacaattagtacccattggttttttacatcctttgcagctgtgccttcacaatatatttagggaaataatttgaatcatcctgaccttaaagcttggtgacaatttggggatgttttccaacttatctttcataatgctaattccaaggaagaagaagatgcatagtttctgggatgggaattagagtagtatttcccaaccagtgctaactggagtctgtgaacatcctcctagcatgtcgtggttaaggctgctgaagagttctgctctgtgaagaaacttaaatcttgacgttgacctgcctgcaaaagatggggtgcttcttcaaaagaggaagtctacttacaaaatttgaacccagatctttctgtaacgattcttatttcctactgttggacttggttatgtaacttattgagtgtgttttccagtaaatatagagtatataatactctcagaaaactggaaatagcacatggaattaagggtattgtaaagatttagagctgtagattttagaggttccaggtaagatagcatttgaagagctaaatgactacaaaatctgaaaataaatgtctaagatatgagtttcttttccaaacagaaaggaagcatacaagttgtaagagatgtggttggcagggtaggtgagggccagattatgtaagactgtattagactttatgtcagttggctattgctgcataacaaattatccccaaacttagtggggatattattagcttaaaacagcaataaatattatcatcacagtcactgtggagtggtggcttagttgtgcagagtttctcataaggttgtagtgaagatgttaaccagagctgaattcacctgaaggcctttctagggctagaggattccgtccaaagctgattctttcacatgtttggcatgttggtgctaattgttggtagaggggtcagtttcttccccctgtgagtccttccataggctgcctcagtgtcagcataacacagcaactcatttccttcagagaagatgatccaaaagagacaagaaggcagaagggcagtgacttttaaaccttagcctcagaaatcacgcaccatcaattctgccatcatcagtgctttagaagcaaactactcagatgtcctccattcaagaggagggaaatttggctccactttttgaagtgaggagtgtcaaagaatttgcaggtgtatgttaaaaccaccacaggtataaaaaggaatttgaattctgttttactttattcctttatgtaacaaatatttactgaacacctactaagtgctaagcatttttatgggcactaaataaagcctctcagagagagtaacacttatgtcgaggcctgaaagattaagaagatatggtaagagtttccaacatctctgcacttgctgtatctgttcacctcctattctctcctgaacctctgtaactggccagtctccttggtggttactcaatctctgggttaaaaattcctcaactgtaaaatggtgacatctgtttcagctgcaacattttcatctaggaaaatacggcagtttcttttaatcactgaaatatatttaataagcttagcaatgtaacattgaaagtaaaaacaaataaaatgagtagtttacacagatattttatgtaatcatttgaaatttccataatcattttctactcttgtgatatattttagagaatgtgaattagcttatgcatcatctatgaaattacctaaggcctatctttagctgagtggtaatattgtagttttctatattaagtggtaaaattgtagttttctatattaagttctggctaagagatctttgaagttttttttttttttttttttaattttaagacctgtaagaattccttttgagatgcattcttgcactggcttttacccatgctagtaatttctcttactgttctttcactattcattagactcaggtttagaggacaaaattccccaagtgaaatatgtgtctgcagcaaagacactcatacttcccctacaaacaccacatcttttgagagacaatggagcaagaagagaaaagaacaataaagaacattccactttctctgtatctgccatcctgatttcatttagacctcctaatgttctctctgatctgtgtgcatgggccataatataccttcttcacggagttaattgctcagtctttagtattccagcagcattttattcatgtttctcttttggaaattatagtatgtctggagccttaaatgattctatatagatgtattctgtgaattgtcattttttttactcttgagagcaggaccccccagtgcctaggaataatttttagaacaaatctggtgctataaagactgttgaaaatgaatagtcacatttactcttatattaagataaaagtaattttatatgatcactctttttaagccaaccaaatgatgaatcttcacttgtgtaagggaagaataaagttatgcatgccaggaaaataaaggctgaaaagttaagattctttaaaattgataataatgacaatgcttagagttgaagttcttatccaaaacattggtgttaaaccattcattaccttgtatattaacagtatttttctctgtataatttctttgaaatgacttataaatatcaataaatttacttgctttaaagattttccaaaagcttcattaaatctacatctgatatgtaaaaatataaatattagctcttgcacattcaatttgtcaagataatccaattaccaaaaggaattttcaccattggctaaaacctgattactggtttatagtcatattactaatgtaaataggaagatatttttgtaataagtgtttgaattccctaaaatacagcatgatttctatatttgaagaaaagcattatagctgtttaataaacctgagaactattatcaatgactgataaataatacagactgaatgcaatgcttatcttcctaatcgtgaaacagagtataaataaatgaagagtaaattacattttaaaatactaagatcatattaatacttgtaattctcacttcttgggatttaacaaaaacctgctttccactcttctggactatagtctggcctctgttttccaatgtatcctccccattcctcgccaagtaatatctttaaaaatcaaatgtgtctgtgtcaaacccccgtacaaaaaccaattcctcgcaaggctttcagaataaaattcagactcctcagcacggcagacagggactgatccctgcctatctaagctgcttctccccagtaacaatgcattaattgtaagtttccgtatgtcctgtgttgtctcattgcacggtgttccttctctttcaaataccttgcctgcttctgtgtcttcagtgtcttccagctgttactcccagtaacttcgttcagatatcatttccttatctagttgaattatgggtctttcatctgtgttctctttatatccaacacataatttaaaaaaactaattatataggtgttcactaaagtgtaatacagaattttgctaacttgtccatctcagtctctgggctgtgaattctcaaaacaggaaccttgaattttgtctctgaatcattagagctgaacacaatgcctagcagtgaaaagtcaccaaacatatttttgttgagtaaatataatgaataacaaataattcatagttttctatggacaggagtaatgttcaaaatatttaataaccagatgctaggagcacctgttggtcacaccagaactactgtaacaactggtaatgctgtacttatttcacccacccagtatcagcctgggctgtggatatctttgacttttttataccaaaaaggagaaaatgcatctattttcatacctacatgcaactagagcctttttagaaacacacagagacataaggtgttggaaagcacctggatgcatatacacagaagccaatacagttgtgttcttaagctattaatatgtgatgataaatgctttcctataaagtttacagtggtgttaaagtgctgccatgccttgtcctaattacccagaggcatgtttcacattctccagtgggctattttttgttgttaaataccagtaagttaagagagaataatttccacattttaaggacctgtagtaaatctttattgccttacttcacatgttttgtaacaataaacaatgctccgatctcccaaccaaagcttccttcatcttttatgtacactattgcaaagggtactgcaggagctgattgacaacctacttccattcttgtctcctagcaccccaagccaaggcatctgttttcaccagaatgaactttctaaaatgcaaatgtgattatggtacttcctaccaaaatacattcaacttttctgcatcacctataacaaacttttcaaggcaatttaaaaaaatgtgctcttaaaaaaatgctcatttttgggctttacacatggagactccaattcagtagggatgaggtggtagagtggtacctaggcactcttaaaagctattacaggagattctatcacacagccaggctgaggaaaattcatccacaggatggagtcctaataccattacagggaagagactattcagtaactgccacctgcctgtcactcccagatcacttattagctcaagactttggcttaattacgtaggtatttgagcctcagctgcctcagtttgaatgaggataatagtacaaatgttgcagcaccattctaagtattagatatagtattaggtcatttatcatccaaactgaggcactattaataattacttcaggatactatgataaacttgagctgtcccagacaaactagagcactataatttgaggagatacattcaaagcattttttacagtggatataacagaagctcaataagtcacattcatttttatcattcttcgcatttgctcccctattctgctggaagttgtagcacaccagggtcatggtgcaaggcacacatgtgatgtttgtgaaatgctctaaccaagatcttgaatgtttgtctatcattactcttctccccatattcttgatactttcttccttgattttttttgttttgttttaactttttatttccataggttttaagggaacaggtggtgtttagttacatgaataagttctttggtggtgatttctaagattctggtgcacccatcacccgggcagtatacactgtgcccaatttgtagtctttatcactcagctccctcccacccttttcccccaagtccccaaagtccattgtatcattcttatggctttgtatcctcatagcttagctccccctaagagtgagaacatacgatgtttagttttccattcctgagtttcttcacttataataatggtctccaattccatctaggttgctgcaaatgccattattttgttcctttttatggctgggtattagtacatggtatatatacgtaccacaatttctttaaccactcattgattgatgggcatttggggtggttccatatttttgcaactgtgaattgtgctgctataaacacgtgtgtgcaagtatcttttttgtataatgacttcttttcctctgggtagatacccagtagtctcccttgatattttttataaaccttgatattcccctcttttctcctactttagctcatctctttgtaagtcccaggacaaggaatgcaaaagaggcccgcttgcaatatatttttttttaaattaaaaactacatatcaagctaaaaaacggttaagtatctcctactttgatgggtaaatcatgacaggtccaaaattagacatcctggaatgcttggagttgcacacaggactgtgatgagggcaatgccactcctgggggcctaccacccagtcccctttctactcctatccctgactccatctgcctgacaggagcatcacatggaagggtgtggacacaccaacctgcacatattcaagctttgttcatctcccatttttaccttccctagcaaacaacttgaaaggtgtgtattacatacctgttgctactgtaacaaattactacaccaccagtggcttgaaacaacacagatttattcttttttagtattggaaattagtcttacagaactaaaaccaagatgttggcattgctgtttccttccggaggctctaggtgagaatcccttttcttgcctttctcagcttctaacgctgcattcttggatcacggccccgttctccatctccaaagccagcagtgtagcatcttctctcctctttgccttctgtcttgctcttgtaaagaccccagtgattacatagagcctgtttggataatccaggataacctcctcatctcaaaatttttaacttcacatctacagagttccttttgccaaattaggtagcatttacaggttccagagattaggatgtggacatatgtgggggccatcattctgcctcccaaagggtgtgcctaccaatggacacttgagaggatgaacccaaggaagaagtgtgagtgagcactggagccacacttgggaacacgtaggcagggattctggtaatggaggagctgtgggatcatggtgagcctgtcctcttggctctcagaattctttgccctgcccagccagaggaagtccctctaaagctcaggacccagggcagggtcctttctcaggcagggacctcagcatggtacatctcctttctcctgctgatctggcgacctctgcctgattccctttctcttgatctatctacaagactgtcagaggaaagcatgttagcaaattgttttactctattaaaagttctttttctcttattttcatccctgccttttgcttgtcatgaaagagccccattccacacccactcattgtttttaaccatcctcactggctttcccttcctttgaatctctaattctagccttccgccacctcttcagtgttcttaaaatacacaagatttcgcctgcttgctgtgtttttttaaaaaatatgctatccagctagcaagttattcctgaatcctacaacgttgttaattcattcctcttatatttcttttttagttgtaaattttcctccaacatttgaagccagaagattttcttctataatcttaatttaaaatcactctacttggtctacttgtatactctgtctttatattttgctggatgttggccattttaaataatgtttccacacttatacaatgtatacagaagaatttttatttccaaaaaggtatctttaaaaaatgttttctccctgtagtcccagctactcgggaggctgaggcaggaggatcgcttgaacctgggaggcagaggttgcagtgagccaagattgcaccactgcactccagcctgggtgacagagcgagactccatctcaaaaaaaaaaaaatgttttctcctcttttaagtttttaaaaatctctgaacgctgatctgtgtttttacttattctcgttaatgcatggaaagcttaaggaatcatctatgtttaaggtctgacatggttttgagaccttatgaattatttcacaagaaggttttgtaggttttttccttaatgagacattacatattcctaaggctctgatgaaaagaaaatttgcccattcaaatttaattttaaactcatgttatacaatttcagtgattttaaaaatctatgcctataataatgttataatattaccatagtgtgtgctccattagggcgcatgtgtctgtcttgtttatcactgtagctccgtgatagcctagccaccagtggctgtattttagtaaataactgtgtaagtgaatgtgagaatgaatgatagaatttcaaaatggctttaaaaaacaatataaagatgttccatataaaccatgctgcctcagtcacaacactgaaatatagacttttacattttcttttttttttttttctttttttttgagatggagtctcactctgtcacccaggctggagtgcagtggcgcgatcttggctcactgtaatctccgcctcccggattcaagcaattctcctgcctcagcctcccgagtagctgggattacaggcatgtgccaccacgcctggttaatttttttgtatttttagtagagacagggtttcaccatattggccaggctggtctcgaactcctgaccttgtgatccacccacctcgacctcccaaagtgctgggattacaggcgtgagccaccacacccagccaagacttttacattttcaatcaaatttgtagtctctcctagcctattctgctatgagtagtaaattacttcactaagggtgctaactaaactctgtatattcaagataaccatggtctgtttaaatagtttatgaatgataaatgcagaagatattatatagatgttattttataaagatgctatatatagtgataattccatatgttatgaacttatacagatactgagataccaaatatgctaaagacactaagatttttttttttttttgagacagtctcactctgtcacccaggctggagtgcaatgacctgatctcagctcactgcaacctccgcttcccaagttcaagtgattttcctgcctcagcctcccgagtagctgggattacaggcatgcgccaccacgcccggctaatttttgtatttttagtagagatgcggtttcaccattgtccaggcaggtctcgaactcctgacctcatgatccacccgcctcagactcccaaagttctgggattacaggcatgagccactgagcctggccactaagatatcttttacgcagtgttagctgacgagaaatgtgactctctggtactgaaatgaagactttcctcattgctttaggaattgtgtatggggcttgattcactgcgattttgtctagctttataatgataaatatgtgtataatttattcagtatgaaagtattttacctatcttccctatgtcgaaggtttacttcctagtgttctctcttatacaaatgattgaaggtgtctttttttattgcttgtcctcagaatggctttactcctttatacatggctgcccaagagaatcacattgatgttgtaaaatatttgctggaaaatggagctaatcagagcactgctacagaggtaagactgtcagccctaaagccttgaattctttgatcttaatgtccatattctttatatcaggctgcaaatagtctccattactttgtctaaaatatgctaggaatgttcatgttactattataatcgcaacagtggctgtgaacaaatgactcaggcttgtgcacagagttccatcagtttatgccttcattttggattcgtgtctatttattcttacataaaatcatgcttccattaattttccatcctctgaccttttaggaggtttgtaccattctaaaattcaattacagtaaattctactcatctcttttcaccaatactttatctttgttaggatccaatataattccttaaaggaacaattttttttaccatcagaaataattcataagtatctgtgttagcacagtttcatgaggaatgtcattaaaaaaaaaccctgtaccttattgaagcacaaattatgacacatggttgtgtgactgattatggcaacaactgaatagaatgttcaaaatcagtctagttttaaagagttccaggacatctagacataagaagtgggagtgggcagggaccctgagaacatcagttttctttcctaagcatttcttattccattttctttgtattttccctctcatttttgcttaggcagattaaggagcaagttcaatgactgtctggggcagtgatttcaagtgatgctccagaagcccttgtgcttggggccactggaaggttgggagtgggcgacatggaagaggagaggaagagagctcccctgagacatgcctcttctcacctgtttcaaccagagtatatgggcttggcttttctgttttttttttttttttttttttttttttttttttttttttttttttgagacggagtctcgctctgtcgcccaggctggagtgcagtggcgggatctcggctcactgcaagctccgcctcccgggttcacgccattctcctgcctcagcctcccaagtagctgggactacaggcgcccgccactacgcccggctaatttttttgtatttttagtagagacggggtttcaccgttttagccgggatggtctcgatctcttgacctcgtgatccgcccgcctcggcctcccaaagtgctgggattacaggcgtgagccaccgcgcccggccttttcttatttcatattttgtggccccactgataaaatttcaaaactcctggcctgaagtgaaagatgactggtggattcttgttacccagaaactatcttaagataatttttaatgtctaatatggcttcctttctggacaattaagtcttgaggacatgaactcccttctatgctgcattagaaggagaggttattaaaatgtaataaatcattttccagtccctttgggagaaaactttttatggagccaattgcaacaagtttctgacagcttattctcgttagttaaaaaaaaaaatccaagaaatcactattaatgagaccatgtttcctacctatgactggaaaacacaactacccagtatgaaatgtttttgagttctctattcaatacacacagattttatactcttgtcacttggatatagtgtgatttttatgatttgggacctttttttccctcagacactagttctgtccatgattaccatgggaatatcttcaggcagagctcaggtaacaatatgagactgcatctttgcatcagggcctctgagaaatatatcaaaataaggacatctatatttgttttatttgattttgatttccttgaaagcagaatcatttaccagatgaaacctttatgctagagtgcttctatttaccaaatagacttaaggtttctagtgtaggatttaggagaactcagctcgctggcattcccagctgtctcatggctcctggctcttttggtcaaggccactgtagcatttcccatttggttccaaaaatacccttttatgtacattgcagcagtagaggccatgttacactctgatccccagaaagttaaaatcctctctgatttcacaaggaaatgtgtcttttgcaaataaatcatgtgaggttttaaattctagcttagacacattatatacctattatttgtttcattttagacaatcatttaaataattaaaattacttttttccgattgaatatataagcttaattgattaaactctcaatgcctgcactaatggttatcaaaaaacacacatggacaaatctttacatattcctttttcgtgcatcattctgtaaaaaaaaaataatgtttttacagggctgtgtggttgattgccatttgatatcctgtgttatactgctaaataccttctacagtcttatgtgcccatgtgtcaatatgcctaaagaagggacttgccctgagctgtttggtagctaatttgcaaaaattaatgactaatcaagacattatgatcactttaaagttcaataattgtgagattattcaatgtggcaatgaaattcatgattgagaagaaatatttgaagtttttaaatttcccataattatggcacttagcattggtaaataaatgatgaaaaatgaagctaccaaactttaatatggatttccttttaattgaggcacttgaacaaatcattccaaatgtttagccttgtcccatgcagtacagattagaatgaaatctacgtggtgaagatccgaggttaaatactaagaagggagttctcagtctctccagtaccatttttatacagtatttctctactctcttccttcttcctaaatattaccaaaattaaaggccaaaaactttttaatgacattctgttctgtgagcaaatgcctcatctctaagaaaaagattaatttcacactcttttaatataaactatcacagtgctgcaggaggtaatacatttaaatatgtatgtgctaatgagtctgtgcttttctcattcacagagcatttaatttgtgccaaacaaagttctaaattcaggctactatttttcatcttaagatactacatgctttactcttccattctgttaagtaatgtgttgtgtttaaaattcagttattattaaaaaaacgattattattgctggtactgcacattgatacaatacacttgaggaaaattattttttcctcagaagtctgcagtgactttaaaaaaattattttcggaaaaaaatggagtagttaaattgtggtaaattaccatcgtctctagaatgcagtcctgggttcaagcaattctcctgcctcagcctcccaagtagctgggattacaggtgcacgccaccacattcatctaattttttctttgttatttttagaggagatgggttttcaccatgttggccaggctcatgtcgaactcctgaacctcaggtgatctacctgcctcagcctcccaaagtgctgggattacagatgtgagccaccgtgcctggcctagaatgcagtctttcttttttttgagatggagtcttgtgctgtcacccaggctggagtgcagtggcacgatcttggctcactgcaagctctgcctcccgggttcacgccattctcctgcctcagcctcccgagtagctgggactacaggcgcctgccaccacgcccggctaatttttgtgtttttagtagagactgggtttcactgttagccaggatggtcttgatctcctgacctcatgatctgcccgcctcggcctcccaaagtgctgggattacaggtgtgagccaccgtgcctggccccagtctttcaatttaccattctattgcccatatttttttctctatggaaatggaaacttctaactttgagacttgttttccaacttttgtggattaaggatgttttttttttctttcacgtaagtagagcctaaaatatattattttttaatgtacttgtcacctttccaggaactgaattcttgtttctagaaagaaaaagatagctttccaagttttctagcatgattatctaagttttctctaccttttcacttcccatgctgttttttaagctgtctttttaagtttagaattgaaaaacaggtttttctacattacctagcacatgtaattttatatctcaatggtcaaaataatataaaattcaactattaagagcataattaataagttatcctaatttgccagagttttagatcatattgttccctaaacttccaaaattgaactggtaatagacaactccatccccaggggctgttttccctaaccattcagatatatttaataacctgcatagtcaatcatatattttatttccctgtctcagtcaccatatctttgattcccagtcagacttggtctccattctttctacccttcccacttttctgctttacctacagaggcattatttaggattggttctcacttttatttttcgattgcaaccatacatttgagcacatcctgtatgtaatatgtttgttaaggaatgcggatgtttttcaaaatgtatagaatagaaattaggaaagccgtctgattaaactattccataatatgatggataactggttataatctgcttctaatcttcccagtaatattttattcttttggttgtcaatcttgatcattaaagattagaggcatcattgcttagaactaaatctctagcatctgaagatgttaacagacaatttttaccttccattttaccaggatggctttactcctctagctgtggcactccagcaaggacacaaccaggcggtggccatcctcttggagaatgacaccaaagggaaagtgaggctgccagctctgcatattgccgctaggaaagacgacaccaaatctgccgcacttctgcttcagaatgaccacaatgctgacgtacaatccaaggtacttaaagctgaacacatttgtggaaaggaactctttggctgccagactcctcctgggggatgataaagaagtaggccatggtgataatgcaaaattatttctggtcataaaaagagataaatgactttcagaggtatttcagaaagaaggggaccatctaaaaaaattaaatgcaagataattttctttaaaagatgaggttgagctttttagaaatctgctttcttattctgtttatagtcacaaataatagaatttaaaagataaaattgtattgtgtggtgcttggggatgtcttcttccagtagaatgcattttgccatgttggaacagtatacccaattgcagcgagcagattgactgtttccataattttgcattgtgtaatatcttccctctttcttccaaacaacactgcttcagatgatggtgaataggacaactgaggtacagtattgtggttataccaaaatttaccttgtctttatttttagtttttgcccaattggaataaatgctcactaattcatactaatgattagaagtttgattaatgggaaattaatttgaaaaccttccccataatgaaggcaaactgataattcaaagatatttagtgtaacatatatttgaagcattatttttatcagtaaaactatttaaataagttattagagaatgaaatgaaactctttcttaacatatattttaatgagtgagatttactattaacttattgtcaagaagagatatgattttatttccttaatgagaattcttaggttagagttttaaggaagtgaaaatttgggaggtttctctgccactgagttttgtctttttatctaattgctgttgccctttttttttctgtatgctctttttctttaccacatttatataataaatgatgttattgagcatatcaagagcagaccaattgctttttcttgtaagtcttaaaatacttgtcatggaattgtatattttccacattccaaagtaagtcacatcaatcaataagaacattaagttcagaagcctctcagtatggtgtgtttgtatatgtatgtatttagtagtctctccttggccattgctacagagagagacactaacacgaacattgttgatgtatattatacaaactaacctatactcaaaaacaagtgactttttatgtaggtccattattgttttgctgaggggattctttagactatcatctcgcttgatgactaggttgtggacttttgagcattctcacagggtatacttgaattatttgtgttatttcttttgttccctatcgttgcatggaacctaggtcagagacaacggaaagcccaactgcttggtgaacttgttcacaactggaaccgtacaaattgatatcttaataactaatttcaatacctttaatttcttagatgctttttggtgattatttaagatacatttttgaaagcagtattggctctaaacattgtgaaagcagaagtttgggtggatttttactgagttataaatatttgcttgaagacaatagagtaaaaagaagagaaaccccttcgtctaatcctgtagaaatgtgaactctgcctcctacttccatgttaatcagggaagcgttcctctgaagggctgataccagttttgtgctgatccaagattgacagcttggttatcattatgaatgatcagtgaggctgtatcagacaataagtttatttttgcaaatgatattactatatttaaatactttgaaaatgatccacccaccctcaatatgtttttctgaaactaaattgtaacatcagtaatagacacacactcagggtatgtctgtgtgacaggaaatatcaagataaacatgaaataaatttagtcaattatttcctaaaatatgaaaatttgacattttataaaataacagccaggttgagggctgattttcccctccattttgacatgaatattggcattatgtaaatgcaaaataaaaatatcttgatcatagataggggatttggattaatagtaactgttcttattttgtgtcttgcttctctctaagtaagaaattatttgtatctaatgttgctacagtaagagcacaaattttcattacctaaggtatctgagtgcttatttagggtgtttttaaaacaaagccaccaaagcctatagatcaactcaatagaaaaaaagttgtaattttgaaaatatttcttaaaaacaatacagtaaacatcgtagttcatttcaagtaaaagagagcaataccaagtaacccaaaaactgcaggatgtgatagccaaataacagtttctatttttcccataatcttttgttaagtagtgaaaattctggagagtaagaaaaattattagatctttgtgtactttaataagaaaagagttaacatgcttctattgcaaagatggcaacaattttcaactagattttcatcagaaaaagaaagaaaaggaaatatatttttttcatttgataatttcagacttattttttaaacattttgagagtaaacagttctgtaatgcccatatagttgatttaacctggttggttaaattacactttattgtattgataaaatttgtttaacattcaaaattggagtgagctgaacttttttcttccttttatattcctattgatgccacgtatattgtttaatttttgttttttaattatttcatcatgacaacaacataatcgtgctacacagttgtaaaagggtataggaatatcatgacagtgtaaatgatgtggaacaaattctatatctttgtaagaatttttcaacatattttcatgcttccaaaagtataatgtcaacaaatactgcttttttaaaacaaaaataaaacaaaaacactggtttctttgaatcttctctgaaaagacattaaaaaattcattgatatgttaatcctatggctgaaacctgatgttgtttaaacatattctggttttcttcaatatgcaaaaccaacttaagaaacattgttttgtataaacaacaaatctcataaatagataaatatttaagataattaaaaatatgccatgaatattatgccaataaatgtagaatatttatttactttttatatgtttagttatgtaccaccttataacattaagatttaagatcttactaaagcatttattattgcttatatattaggtagacttttaccatgtgaccttcttcactaatacaatggctgcaacatagaaaagtgaagcgctatactgactgtcatatctttgctttcatagagtggttttacccctttgcacatagctgcacattacggaaatgtcaacgtggcaactcttcttctaaaccggggagctgctgtggacttcacagccagggtatggattgaaatagtttctcattctagatagcagtaaatgaatattttaataaagtaaaaaggaacaccaatggctttcttaaagattttacttctttttccttacctgggtctgtgctggagatactagatttttcatttcctttctttaaatcacaagaagtcatcttggcttaagcagaaaataagaatgttgtaaactcatgcaaaaattatttccaatagttaaggatgacattcattctgaccagtatgaacagttatatttaacgatcatgccatgaatcctgataagtcacgtcaaaaaattattaaactgttaaaatgttaactataaaatatataagtagcatgtcttatgatgactgtagggcacacaatttgatagggaattgtttttaatgaattgagaatttgttcacatgaagtcttactaaaatacataaaaggtgtcacattgttacatgtttcatggtatgctgttattagaaagaattcacttacatgataatggtatatatcagtatacttaatatacagttaatgcagaatatgaatatacaaaaattacaacagacaaaaaatcaggtacatatccttgccataatgatgatatgtgatagccaataaaataaataaatataatttgtatgtataatgtttttgtactaagaagtcatctgcactgaaactatgttgtgttattttcaagctgtttttcttactgaattattctgaaggagacgtttgtttgttgttgttgctgtttagagacagggtctggctctgttgcccagggtggagtgcaggggcatgatcatggctcaccgaagccctgaactcatgggctcaagcaatcctcctggctcagcctcctgagtagctaggactacaggaacacactaccatgcctggctaattttttaaaattttttgtagcgatgaggtcttactatattgcccaggctggtcttgaattcctggcttcaagcaatcctcccacctcaacttcccaaagtgctggaattacagacatgagccaccatgcccaacttgaaggagatgtttttaagaatcatttttatattggatattaatacccaaatatttgtattctgtttttaagaatcataaaacttaagatgccagactctttaagtgcatggatgttatagaaagaaagactttacactagggccctatcttaggtagatttaaaatttttgtttctattacagtaaagtggtccctttgtctcttgactataacttgtacattcaatacatattttgtagttattgactaacttagttatgcagtttcattccatttttcattctctaactatattgttttgtggtttgtgtgatttttgttccttaaaaatcaaagacatagaaagagtagaaactgtggatcaaattaccacgtaggtcacaacttcctttgtggcctttaacacaaaggcatcgccatcatgccctgtcatacccaacagctcttgtttggtctttctgtggtgtagaatggaatcactcctctgcatgtggcttccaaaagaggaaatacaaacatggtgaagctcttactggatcgaggcggtcagatcgatgccaaaactagggtgagtgtctctgttctttcaattttctaccattattatttctttcaagcctcatagaaggcacctcaagacaccaggtcattaacataagcaatgtgttttcaaggaaattgctttattggaattgatttaaatctcatacaacatttaaagggttcataccgtacagtgaaattaatatttgctcataagtgcccagagaagcaaaatgttggtccctcaatgagatagtttttcaagttttggcttagtgattttctgggaccaaagatcaaagattaggcttacacaactctcttttgggtagttataagtatcaagaacccaaactaattaccatacattaagattgagaatgtggcttttacacaaaatattttagtacatgtttacaatcttttgcttctaagtattcaattcctaattcatttttcttaagcagctatgctatactgacctgagcaggggatttgctattatggagaaaagcatacagttagtatactatacctttatgtcattttggtagaagtgatagctttcatttgtttcaaacttaagtaaaatgtcatttcaagtttgcagtacaccccaaatagataacacaatagacagtagagttcagttgttaaaagtgcagaataaaggcaaactgcctgatttcaaatcctatttttactattaataagttgtattatattggcagtttacttaccttctctgaacttaggctaataataacacacctacttcataaagttgtgtgagaattaactcttaggtatattatttaccatttttgaaaaagcagagtaaattacctagctcttcataatatttgataatattactgacgttatataatatgtagttatttgctgaaacatgtaaggattatttcagtattaattatctggagtagatttggttaatcatagacttcagcaaaacttcaaatgtgcctataatacaaaaatgttaatatgtggtataaaagtctatgttaatatgtggtgtaaaaagcctatgaaagatgataaatagaatatgtctcttatggtattttacttcactttgtttaattctgagacttcatgttttcatagtcccagcagtaaagatcaaatctagtttccttgcaaatctgggggctagcaaacacttttgtttaataaactttatcatctgtaagcttccagaatctataccagtcccagactataaattatggtttttaatgacctcaggaaaccttgctttcttaatctcacttctctaaaacttttggtccagagtggctacatcacaacacgtgggagttctggagaggtttgcgttctgtcaaatctttgctgtggtgtccagtgtctttgcatcagagttttatatggtttctactttttgcttagtaggcatgcctttttccttaccatactgtgagtatacagaatttggaacagtatgcgttatgttgcatggtttgcttacttattctttctatttaaaggaatgagttttgcacattactacattactaacatcattactaacattaccaatgtattacattacaaacatactttactaacataatttcttcctatatactgcctttatgagattaccactggaaagaaagcattttggaaatgcaaaaaaatttttatcttggccaatgtcttaaggatgcacattgcttttattaatgctttttggagtattaactcattattaagatagttgactttgttcttattaatcaacagtatttacttaataaaagtactctaatttgtgtggcttacatatatttgggtatacaattaaaaagtctaactccaaatagacagtgtatcttcataaaaagagtactaagaaatgaagagaaatggattcttatactagttctgtcatagtgcagcctttagatacagcaaataaattaaatttcattcaaggatttaaaaagaataaaataggttttctaactgtatacattgtataaacattccattcatttattccttaaacaaataactattgagttcctacttggtgctgtgaaccctgaagatacgacagttaacaagacagagtaggtttctagactcatagagatgcaagtcagtagttcaaggaattaagttaacagtcttcttgtaaaagtttaataataggttcttaaaaaacaaaaaaacaaaaaacaaacaaaacccttgatttgtagcattacctttgctggtttccatggtgtaaatacttctacagtggtcagtttagagctagcaacttggtatcactaaatgtagaattgggaagaggtgtgcaaaaagtggctctccttatttcatatgagctggttccagcacaccccaggattagctacaatattgaatggttgcactgaacatttttatttttattatactttaagttctggggtgcatatgcagaacatacaggtttgttacacaggtattcacgtgccatggtggtttgctgcacccatcaacctgtcatctacaataggtatttctcctaatgctatccctctcctacacccgtcccccaacaggccccagtgtgcgatgttcccctccctgtgtccatgtgttctcattgttcaactcccacctatgatcgagaccatgtggggtttgattttctgttcttgtgttagtttgctgagaatgatggtttccagcttcatccatgtccctgcaaaggacatgaactcatccttttttatggctgcatagtattccatggtgtatacgtgccacattttctttatccagtctatcattgatgggcatttggcttggttctaagtttttgctatgtgaatagggttgcattgatcttttttagcactaaactttccccccataagttgaaatacttcttcatctgtaagtagaaggattttaaaagcattgttgggttcttttcattctggctacagctaacagacctatatccctcttactaaagacaaaatcaagtaggaggtaaatactgaaatcaaggactgtgggctggaattgggaggccaattctggaactataatatttgattactaaaataaatgaatatgttttgctttttcttttgcttttgaaatgtattcaaaaatagaaaaatgtttatattaattagttctcatgctgctatgaagaactgcccgagattgggtaatttataaaggaaagaagtttaattgactcacagttctgcagggctggggaggcatcaggaaacttacaatcatggcagaagcagaaacaaacacatccttcttcaaatggtggcaggagagagaaataagtgcccagtgaagggggcagccccttataaaaccatcagatctcatgagaactaactcactgtcacaaaaatagcatgagggtaaccaccccgttattcaattacctcccactgggtccctcccatgacacatagggattacgggaaatagaattcaagatgagatttaggtggtgacgcctaaatcaaaacattgataaactatatcaatgtttaatttggttttgactatatttttagagaatataataaagcttctacatatgaaaatttttttttttttgagacggagttttcactcttgtcacccaggctggagtacaatagtgcgatctcggctcaccgcaacccccacctcactggttcaagcaattctcctacctcagcctcccaagtagctggaattacaggcatgtgcctggttaattttgtatttttaatagagacagggtttctccatgttggtcaggctggtctcaaactcctgacctcaggtgatctgcccgccttggcctcccaaagtgctgggattacaggcgtgagccaccacacccggccggaatgtttttaaagtattatgttttcattttgttgttgttgttgttgttgacatctcaatttcccccagcatttaaattaaccacaaatattctgaatttagtatattctgtcaaggatcttgccttgatcttctcattattttttctcattcataaggtttttattatctagagaatagcaagatctagagaggctttcagataattaagaaacaaatattacccacagttatttcttggctctcatcaccattttggcaatcattgaggcattttccatcttgttggcattctcatcattgactactatctaatgtgaaactctaagacatttgcaccagagccttttactggtatctgaaagacctcatttcaatgtgaaaacgtaaattttatagctagtgaaaatgaaattataaatttaggctttattaagggcattattctttttttgtttttaagcttatttattatttaaatgtggtgataccgcatattaggattatgtttaaaatattaaaaaacatatttcaaagcaaacaataaaaagtgtacaaaaacattaaaggatgatgaacaaaaaacacacagggaaaaggaatcacccttcttacttgttattaggtataataattaaagcagtaacaataatggttttcaattgtcatatgcatatgttgttctaggcaccctgctaagtactctacaaatatcatcttattttatcttcctaacaacttatgaagtgtgtattattttcttgttgagaatatatggaggtcttcatttgagaaatgagactaccaaagggagaaattagtttcagcagaattatgtaacttgacctaggacacagaactttgtaatcagcagagcctacccatgtattcacacaaacttcagaatacattgttgaaagaatgacctaagcagagaggggggaagatatgaaaagataaagaaactacataagtggcatccctccaatgttgattgatctacctttatgaaaattatccacatcatggtgtatagtacatccgtgtgatgaactgattctagagaaaaaaaaaaaaacaacaacagagaaaacacaaggggtctctggaagggggaaaaacccataacctgcaactacaaacttaagaatttaagtaaaaagattttagaatacaaaagcttgaaaagaatttttttggggcattaactttataatgtgctttgcagaaaatattcaaaatctaatcaaattgagcctgttgggtaacttgaatttgatgtcatcattcacacatcttataagcacagacaccttgcatcattaaatgtaggatttagaactaatttaatccttattgttccttgatgttcttgtgggtatattaaatgttctccataaagctcctgttgttactctgagagtattttggatgtttcaacatgattacacaaagactatttcatgcaatttgcagaaagcaatactctgccttttctaaaaaacatgtaaggtgccattccctccttcatctttcaaacaaggcttgcaagttaaatagggtgagaaacatcatctccactctatgtatcacgaagctcagccttagagagattcatccatggtgaccgatttgagattcactgcagggttccatggttccgaagtccacacactgaactgttacatatgatgtctctgttcaccatgtgggatttctcaaaccctaggtctccacaaagccctcaccaagaatacgtttgagaaaccatgctatatctaattgttaggtaagttatgtagcaactaatgctctgtagttccaccacagggtgcttttatcaggatacaaaagtgtaatcattgtcatcactttgctggaacaactctttaaggctcctatctggcaaattttaaaataatgtagcatttcaactacactagctaaatactttttttctgagaaggcaatcttttcatgctaattcttaggtacccaaaactgcaaaatctgttttggttattcaatatcttcgtactagctaaatggatttcacaaagcaaagaatcattatcagtcaaggtcctagccaaaaacagaggcccaaatttgatcatttgattagagattattgaagggtctatttataatattgtgtagtctgtaggaaagagacaagggacaagggacagtgtagaatcccaggggctagtaacagcgggactcaataccagtgctcaacctaaaaagtgagaagtacaggagacccccagaacttcaaaggagagaattgtgtggaaaggctgctttggcaggaaggtaaactttcgtaaagacacacagccggatttgggaggtctctcgaagtccttttcatgtcttgctgcattggccaaacccagctggaagccagaggacaaggcagctcactgatgccccctacagtggccagtctgttgggacacagagcagggaggagaagggtagagcatgggtctggaggggcaaacagaagacatctagcatagaaatctccgtgttgagtcagagtgttgcgattcagaggaattatttttatttggagtaaagcataacctggagagatggtcctggaagtagagacacaaacgagaggccatttgagttctggataaatcagaaactgctgaaatcttcttaattgctcaccatccattctctgtgatttatccaccttctccacctctgtccttgggacaatctttttttctttttccttccacctcaaatcaccagtaaatttaagcactcagtatttcattttctctctcacttcttgctcactgttaattacatttcgcctcacatttcccacccactctgctttttgcccatgccaccctaaagagaaataaaatataaaagacagagggcacttggggattgctctggaatcagaggctatcccagaagtgtaaagatcagaaagttttataagtaatatagcatacagttctgccatattttatttgatggagttagggttctatttattaataataaagttcatctttgggaagcaattatgtgatttctaaaatgttgaaatatatgtgtgaaaatctttaaaatagtctaaaaaatgatgcttcacttttgcaagcattaggaagcattttagaatttatgaaagtgatgacaattcaaaagagaacatatgtgaaaaaattacgctaagaaaaatttttaggtaaaagtatattagaacaaacaatatgaagacagtataacctaatataatccctgttttcggttccagggagtagagctttaaatttcaacaaatgccacatactgtgctttcccatcttcttgaatacgcagacacatgaccagaagccaatttcattccattgaccctctgtccacacaggggatctctcttgctttctccctgtctctgttttgtttgtctttccctttctctttcttgttctctgtgaagatgtacttctgacttgttttctctttcactcatctttctggttatttaacaaattgcagttctattacttatttattgagtaatcaggattgagtttaggaactccctctttatggttgcaatagatgaaatatagatttttttgaagtgaacttgggcctaattctttaattcttttggcaggatgggttgacaccacttcactgtgctgcacgaagtgggcatgaccaagtggtggaacttctgttggaacggggtgcccccttgctggcaaggactaaggtgagtcattatgagtaagatggggtcctaagaaatctttaagttacttgatgtattatctctattcttttttaaattgaaacatcaggcaagcattttctagttctttaataattgtgtgctaggaataggaatatgtatcaaaccacttaaaattattaaaataaacagatatatgaattaagatgtattaaatgtgtgccttcaagtttttgtctatatttttacctgttattcttactgcagatggaaatctgaatacatctgtattttaaatataaatgagaatatctcttagatgctgagtctagatttttatgattctctcagatgactatgaaacatatataaaattatcttttaaagcagaacaattagcaacacaaaatgaatctttttgctcatccaatctttatctcttaggcaatactaataaaaagtaattactcaacagtggcattggttgattatgttgaagattagtagaggtgatttggaaagtacaagttgcaataggccacctacaaagaactattaagcaagcatattttctttatgacatactacatctagccctttttcctcccgttttatcaatatgctcaaatatgggagaagcacttttccatatacatgagcaccacactgtgagttggtttgctgaagatttttcattatcaaatgtattttaaatgcttttattattgtatagttctctattatccaaccctacattgggttatcagaaaatattttgagacacgaattggagatactcatacagagctgattaatgtgatatgcagcaaccttggatccttaaatacaacacaaagttagacaaagggcagttgttgtattttctccctattccattccacctcataccaccgcccccccccccgacagagttggtatcaactaatgctattactagggtaagctgaagaaactaaggcaattgacacaaacaaatatttttcaatttatatataattgaaatcatttgaaacaaaactagcccatatgtttaagatatgtgtagaatgaactcaatttgtaaaggtgtgcccacatgccataaaagagtggcttcaaatcagtaatatatgaagaagagaaataattatccgcgttacttttattctcatacctatactgtgaatgttgtatagatctgtctttaaaatgcaacaatttgggctgggtaatgcagagataattatgtaaagttttgataaagaaacgttgaaatttaaatggaaataacaaaatttcagaccaatcatgttacagccaatacaaaaaccaatatgaagttgaaaataggcagatatgctttacaaaccgtaaaataatcttatctgcagagtttgcttgtaattgtcatgtcactaatgaagatggcaggttacctggatggaatttttttaatgtccttcctgtaaaatcaagtatcattcaaatgtaaggatcctgcataaagtgtctctgagtgtacaattatgttcatgtattcatgcatccaactattatataatattgagtagatacaatttgccaggcaagtgttctagtcactaaggcaccatcaagatgaataatacaaaatctttttttttttttttttttttttttgagatgcagtctcgctctgtcgcccaggctggagtgcagtggcacgatctcggctcactgcaagctctgcctcctgggttcacaccattctcttgcctcagcctcccgagtagctggaactacaggcgcccaccaccacgcccagctaattttttgtatttttaggagagacggggtttcaccgtgttagccaggatggtcttgatctcctgaccttgtgatctgcccatctcggcctcccaaagtgctgggattacaagcatgagccaccacgcctggccataatacacaatctatagctgcaagaagctcagaaattagtgggcatgatagaaaaaaaaagataattataaaaaatagagatatgtatagggtaataaacacagagaagatgaattaatcaggttagagtgaggggataccgctctcctgggagtggaataggtacctaatgctagactattctccctccccttctgtattagtccgtttcacgctactgataaagacatacttgagatgagactgggcaatttacaaagaagtttaatggattcacagttccacctgaggaggaactcacagtcacgaggctgaggaggcttcacaatcatggcagaaggtgaaaggcacgtctcacatggtggcagacaagagaagaaaatgaaaacccagtgaaagggctttccccttataaaaccatcagatcttgtgagacttattcactaccacgagaatagtttgggggaatccgccctcctgattcagttatctcccactgggtccctctcgcaacacaagggaattatgggagctgcaattcaagatgagatttgggtggggacacagccaaaccatattaccttccataaaaactcctaggtttaaatcacccattctttcttctgaagcaactatctaagtgtcaccccctcattctttgtcaattctagctctcagcaaactgtgactcctcaccacaaccccttcttattcttgctgactttaatgatcttgattagagcagtagataattcttctagttggcctctcagttaggtaactctaaaccctctatctatttctgtgtctaacttcacacttgccagcccctcctatgtttcagctcactctcttcagaaccccaattccgaaattcttttattctgctgggtccttcagtcatagtttcactcttcctcattcacatcatgcccttacctctgcccagcacaaatttcatagtcatttatgctactcccttacgtattcatactacctgcatttcactcaattaaattcaactcacattcatgcaatcaaatgtggctacaggaaacacccagccacactaactgtgctcattttagattcatgatcactaacctcaagtcagctggtaatgctgcctgacaatctcgctctatcttctaagtctattcactctcgatccctgctatctgaccattctatattttcttcaaacttatgtagacttctttccttgtcttcatttcccataacactgagagaattcaagcaattggaagataatttccagagactcccacctccatatctatccatatctatccagtgacatgacttggagcccatgtagtctacattctctcccgttactatcatctggtgtgattgcttggtcctgtcttctcaaaacactttctttatttactttctgggacattacattcttctgactttccttctgttttcctagctgccacttctcagtctcctttactagttcctcctcatctctcaggtctctgaatgttagaacctccagagctcagtctttgtatcttttctctatcggcactcacttactatgaaatctcatgcagttctatctttaagtagtacctgtatgctggtgccacgagtgtacatctccagaattccgtatgtagatgtcagctccccattgccacttggatgtctcctgggcatctcaaatttagtaagctcaaaattaagcactggatataacacccacccctcaacctaatcttcctgttatccttcttatctcaacaaatggccatctaattttttttagtttctcaggccaaatacccatgtcatgttggactcttctttttctcactttccacattctgtcaccaaacactgtcacctcttccttcaaaatgtgtcactaattcagcagcttgccaacaatctcattactaccactctggtccagatcaccatcaaccctacctggaggactgcaagaggcccctaattgacttcccttcttttgcattctgtccatatggtctattctcagcacagcagcaagagtaatcctgttgccctaaaccttccaacagcaccccatgtctctctgagtaaaagtcaaacctgcaaggtctctcacctctttgaattcctccccttatccatcctcctcaatcacttgccttaaaccacattcttctccttacgattattgatatcgatcatgcccgttataatcccaacacaatatatttgcacttgccttttctaagcctcaggtgtttttcccccaagtcaacaagactagctctcttacttccttcacgtcaaaactcatcttctcagtgaggccatttctggacatcctatcaaaattgcactcacgtacacaaactccctaggccattcggtgtttttgttttctcctttccattgatggccatccaatatactatatactttaattcttattgtttttaaattgtatgtctgtcttccacactagaatgtaacctcgatagagacgggggtttcctgtctgttgtgttccctgctgtatccacagtacttgaacagggcttgagtaggtgctaagtaaatatgcgtaaaatcaacaaaagattagatgatgaatattttattttccacgtaaataaccttcaaataggtaaaacagcatcaatgaatgttaatttttcaaagaaacatgcaacactccagtccaaacgtcatcaagccttgaatttcttctacactttgcaattatcttcccctcaatgcataaatacttctcatcagcctgttgctgttttctaaacttatttaatgaacttctaaacatgaaagtaataattatgaatgaagattatttcaaaatatatgaataatttataagtcacatatactctaccacaattaagaattaatgtatttgtttttgttgtccctcactgttgaaatcaccttccttgttgagaatattgggcggggggccttttctggtaaaatatccagatacaatttctgctttgttgaatgtaatgactgtcaaactggatacttggcgaacaatcctttttctagtggccatatttgcattggtattaataaaagacaatagtcccatctctttaataggcaaattgttttttaaaatttagttttttcctaagtttacatattgtttcctgaaagtttatttatttagctttaaaaaaaatgagagtcttaccgagtctgatgaacagtgcattaccctgctttcttgtgttcctgctgttgaccttactctagaattaaggctaaagctgttttggtccatattaatgaagacaaatttagattatcctcaactgtaaaagttgtgaggtcattggcacatggcctacatttgcctcacactcttctagcccttacctacctgttttctccaagtccaattcaagtagtctcctaatactataggtaaaaggaattgtaaaatttcagaggaacatggatctaaaagatggtcaaagtttccatacctccctgacctgcccacttgcttctcattcacccacttccctctgtatttataagaaatgcaggcagagagattaagtgaatgcagactgctatgcatggagttggatacaaataactgaagcattaggtattatttatttttctgtatttaatattgccctaataactgtaaaatcaggctaaattgccacacataccatgcatgacagacatactaatttgcatttttgtctatggtagcataattatgaaattaaattatctcttagtgttcatctctgcgaaatatagtctgctgtatattctgatgtcaaatggaaattattttttcccctgccactaactgtgttagagatcaagaatcaactttgctgtactttggaacctgaaaataatgaaaaaaaaaaaggacattattttgttttcttttaatgtgcagaatgggctgtctccactacacatggctgcccagggagaccacgtggaatgtgtgaagcacctgttacagcacaaggcacctgttgatgatgtcaccctagactacctgacagccctccacgttgctgcgcactgtggccactaccgtgtaaccaaactccttttagacaagagagccaatccgaacgccagagccctggtaaacttggcccagtccacattaactgaatacagattgagacaaacaaacccacattcattgaccaacatgcatacaccagcaatgcaaggttacagatatgtagttaatcctgctaaatttgtcatccttcacaatcagcctgtgtacttcatacattcatagtttgttagcaaatgctggtgagcaaagatgtatttaagagaacaccaatgtaacatttctgaaactagtgagttgcaaacagatagatatgaaacctttggagtgataagcagttttaaatggaaaatagaagttgaaaaataggaaattacaaaataaattctagatacctctagataaagttagaacacgagtatgaaaagttgaatttattaatctctttttggaaaaaaaattaatggtgaatatatttgactatgtaagggggtataaaatgtaagtctatgcagagttcaattgaaaattttcattgttgacttgattactcaaccataggctaatagaaaagttatgcctagtgtgttacggcttcagggagcattttatatacaccatttcaggaactgctcaagagaaaactgcaagaggctgtccctagagcagctttatgtctccccagttctgatattgaataagtcttccttgcttcacttattttctaacaataatcattggaagtattagacatgtactaatttatgcctcttgtgtcctaattcccaaactaaaagtaaatcctttttttctatgtgtttacatggtttgtgtctgttaaaattggtcttcaaacaatcagtatttaagctgagagaccatcattagaatcatcaaatattaaatatgatttttacaagaatttttccattggaatcaatttattgataattacgtgggaagtgaatatattttccagattatatgtaattatgtgaaaacattcattttgtctagggagtcaaaaacattaatttttaattggatagtggtcaataagcttataaaatatcacagcctgttaattgcaaatattttaagtgctgcatgtgcatgtggctatttatatctggcatgttgtatagctcataaacaggggaaatgacctaaccaattaattatgtttatcactctattgtgaaaaataagaagtcatcagcttaagtaagaccatatgctttcctgagaactgctagtgtgtaaaaacgttgactgatgattggtccatgttgggacatgcgaaattgttagctggcagaatagacataacaaaggaacattgttgaaataaaaaaaatatataatacacgatgagtaagcaccgggccatttaacatattttacttaatttgccccaattcctgggcattagcctagttcgccaagttagaaagtacctgacagacttcttctccacatttctttaccccagagctacctccttgcatttatcccagaaattctccatacatttcttgaaaatattcgagaacttaacagtcatttctttatacaataaaatttatctcattggcatatatgttataaaaatgatataaaaatatagcttctgtatgtaaaaatgatcaacataatgatttctgctgactagaaatatgccctttataaagaaagtcgtagcaaagttgaaatatttcttacaaaggcagtatattcttagattttttaagtagatgaataattcttatgctctgagaaatggcccttcagaagaatatatgcttatcttcagttcatcttcaagtaatttaataaccaggacaatcaatataccttaaaacatcttagaacttctaaaatgtaattgcttctctgtttttctttctttaaagagaaggaccatgtatttttcttcacttttgttttccctgtaaccacacaaacagaattacgtacaggcccaccacacataagtgaagttcagtgcctacaggaacacatcaccatttttctttccaaattccaacacctgcagggattgaagaaatggtaacattatgtgacgatgtaacattattgcctgcaatgtgccagcatggagttgtgtgagaattgtttctgcatgttttcaactaacttgattgtcttttgcacagaatggttttactccactgcacattgcctgcaagaaaaaccgcatcaaagtcatggaactgctggtgaaatatggggcttcaatccaagctataacagaggtagaaaaatgttttagctagtcacaaagcattccttctcttactccttcctccctttcctttttctcatcttctgtcctcttcactcaagttttatttatctgaagaagccccaaagccccaccggtgcagaggagtaaaactgctgttgctttgtttcgcagtctggcctcacaccaatacatgtggctgccttcatgggccacttgaacattgtcctccttctgctgcagaacggagcctctccagatgtcactaacattgtgagtatggcttgggtcagaataaccccagggaggaagagcgagaggaacagagattgtgggtgtgtgtatgtgtgtttgcgtgtatgtcatcgaagtaagcaaccaagctttgagaagggcccttgtaataacacattattgaaataatcaccagaacttcactgaaaagaacctggatagggtaagaggtgttataaagtaaaatggaagctatgaagtgagacagcttaagactctgggtgtaggtggattgaacatgcatcttaaatgcatttattaaaacaaaatacattttaaaagctcctctgcaagtgaatggataattggttcgaatagaatctttagggctcaacctagttgcttgagggaattgtattccaggcaattttcacaaaaacatcaaatcattaccataattaaccttaacaaaagattaaccagagatagatcaatatcagagacttttacttcgtgtcaaactcttccttcttcaattacatggatttcccattttgtaacattacgttgatttttacttttgatttgatctgatttgctagagtggaggcttctcttagctgaaagttataccacatatcctggaatgaatgttggtctccagaccactttcattcaatcaacaagtactggatgtctcagaatttttctatgtaatctaaattaggattttcacttctaatttctttgtatatctctcattttcttggattttccccctttaaactttggtcattgtatcaggataaatcattgaatgcaaatgttctcctgagcaagagaacttctttgcacaaggtgcaggcatgtatttgaagttcaagaaggtctagtagagtattgagattcacatgtgcaccagaaataactctctcaaaataaataagcttattattaaaatgagctatgttgtcaaaagcaattgattggcacttgttgctaatttttggcatctcattccatttaagctgtgaaagagaatgtccagtttcactttttatttgtattctctctcatatttctttttttctgtatttcacacaccatttccacagtgaagtttctgatggctaggaaaatccattgtgagaattaattcaattgagtttaaaaattatttaatactctctcttcatgttattcagtaattggagcataaaatcattgaagaatttaaagtctatatttataagttttcttaattatagcttattggtcctaaggtcataatattatatgctaatctttatttactccattagacatgagagtaatttcacaatgtgccaacataagtttaatttctagtcacttcttagaactttaaaagtaatcatcatccccccccttttttttttgagatgactacctttttttttcttttttttttttttaattgagacctgaacagatttacgtacaggccagtaacattaaaacaaaaaacaaacaacaacaacagcaaccaacaaaagaaacaagcaaacaaacaaaaaaccgctgtgttcttgcccgccttttccttttttatctccacctattcttatttgcattccaatgcttataggatcagaggagcaatagtgacactgttacaatatgttatcacattataatgataacatgtacaagaatattctgtgggttgcttgattgcaatcccctgaattaatctcttttagtggagacttttacaaactcttcaaagaataatccatataaaatggttgtggaatttgtggccactcttactttgcttcttcactgaccaattccaaatcttcaggtggttatggagttataatatactcccttctattaaaaaagttatatggggtacatgtatattttcaaataaaaataaaatattaattgaaacaaacaattttgacatatttttcaggttgttgaagactttcaaatttgacaatcattatattaaacttcagcttccaactgttggtcatttaaagttcttcattttatctgttcatttgtccattatattatctttccatccagctccctcaaaacaaattcttgaggggcacatgccaatataatttccgtgttttctagttatgttttgtaaggtaggtccttcaggaagcagatacctattgatagggttgccaggtaaaatataggactctcagttaaatttaaatttcagatgaaaaataaatttttatatatgacccatgcaatagttaagacatagtaaaataattatttgttgtttgtctggaattaaaatttaactggctgtcctgtacttttaattgctaaatctggcaatcctacatttagaggaatttaactttctctagcagtgggatgcctgtgaagttgtgttttctcagaacatgaggatatagctactggatccaaaattctttgcaagttgatgaagaaaccgtgtgaacgctgactgcctgcttgctgtgtcagagttggtcacttcctgaccctaaaacaccccacccttggagcctttgtgtgttgcctgaaatcatgttgcatttttgaatgcaatgctgtttgttgtgcttcgatgcttttcaacttgatgcgcccaaagtggaagtcaatgtagccctgtcagcagagtcagttttaacaactgagaagagtggcatgaaatttagtacctgctttggacatgagcatacccattctcttgctagttttgtttttgcctgaaaattcactccaagtgtgaggtgtaccagtaactcaatcacgtatagacattttttttttaactgaaaatctccttttccagaaggtttattaatacgctttgaaacttagaatgccgaactgccaattacaacacatccataatccaaagtattcatcaataaccataggaatagaaaactaagcattttaacaactatcaagaaagaatgcaaggtcttacaaagttttatcttccttcccataagaaatcagtggactaatggtaaagttcacacattatattatgcttaaaaatttccccgaatccttaaatttcattagcttgagataagaaagacaaggctattaaataaaatagggtgcctgacaatcaagacatggaaattatttattacaacaatatatcctgattttcattttcttatttattcttatatataaacaatggtaatattaacataaaagactaataagggcaacttacagtagaagtccattatgccagaggtgttagataataattaaacaagaccattattataaagtggagagaccatgtgtgtgtttatacataacctttgtttgaatttaagccttagtgctttaaattagattctatatctaactcatcaatttcaagtgtgtaaaacccataaaaaaaacttaagtataaaataaaggttttagaaatattggccagtattggaaacatttcagattttgaaagccccttattgataaagcttggcttaaaaaataaacatgaaggccaagcgtggtggtggatgcctgtaatcccagctacttgggaggctgaggcaggagaatcacttgaaccaaagaggtggaggttgcaatgagcctagattgcaccactgcactccagcctggggtacagagtgaaactttgtctctacataaataaataaataataaacatgaaaatttgtcattacataggaattcctgggacctctttgacttttaacttcttatacagaaatttattcttatcatcatttctaccaaaattagtaaaattgctagccttttatcagacctagaaataacgtaaagatttgaggagtattgtttttgtttttctgagacacgaccttgccctgtcacctaagctggaatacagtgggcaagattatggctcactgcagcctcaacctcctaggcacaggctatcctcctgcctcagcctcccaagtagctggaactacaggcatgcaccactatgcctggctaatttatttatttatttatttagagaagagatcttgctatgtctcccaccctggtcttgaatgcttgacttcaagcaatactcctgccttggcctcccaaagtgctgggattacaggcttgagccactgcaactggtcttgttttgttttgtttgaataccatcggccctctgtatcagtagcttctgtatcagtgggttctaaatccatggatttaatcaatcttggattgaaaatatttgaaaaaataaaaataaaaaactacaataaaaataacaaaaaattttaaaaagtacagtataacaactatatagcatttacattgtgttaggtattataagtaatatagagctgaattatacaggattatgtgcataggttacttgcaaatactacaccattttatataaaggacttgagcatccatgtattttggtattggtgggggaaacaggaggcctgggaccaatccctcaccaatacagagggacaactgtagttagaagattttagccttgccgggcacggtggctcacacctgtaatcccagcactttgggaggccgaggcgggtggatcactaggtcaggagttcaagaccagcttgaccaacatgatgaaaccccatctctactaaaattacaaaaattagctgggcatggtggcgggcacctataatcccagctacttgggaggctgaggcaggagaatctattgaacccgggaggctgaggctgcagtgagccgagatcatgccactgcactccagcctgggaaacagagcaagactctgtctgaaaaaaaaaaaaaaaaaaaaagaagatcttagcctcatctatttagagacaggttttaaatgatatggaaaacaagttagaaatcatgattgtctgtccagggaggaaaaatcttgtgatacatctaaagtctgaagataaatattagcattccaatgatacatcgttttataaaacaacatactccagatacatttactttacaaaagtctaaatctgttatcagaaaataagcccattagaggataaatgagtcatcaacaaagaagagaaaattagagtagatatccaatttagtgctttcacaatcaaatcatttgacatgaatttctcataacttcaaaagaaatgggtctccaaaatactgagaaaaaattaactgtgaactatgtgccaaattaaagttcaccttaaagtttctagatttaagggtttgttgtacaaggaatcagaagaaattattctctgcagtttgtcaattaccacaaccaaatttaaaatcaaatttagtttatttggaatggtttactttacttggttgaaatcatccttatcttctagaacagttgtggtaaatcaatctgtaataatttttattccaatatcttattctaactgtaaaattacttgagtgaatgaaaccctgccttctttagaactatatatggttttaaaatatgctgatttttaaaaacctctctcttagagacagtagagtaataaccggctacttgatgagaaaattctcttaatcaaacccttgttcttcatgctacacctaaagccaccctttcctgacaaatgtgtcatattttggggtagaacaaagatacctgaggcatgatgcatggcctacctcaacagatgacactgctgacagtcactttattcatctttcagtggctctctcaaataactgtctataattaaatatgctcattaatcttaaatagaggacctcctgggcaaatcaaatttcttgtctgatccatttttgtctagtctcataacacaaaaaaatcagatacaaaataatattttatttcagaaggaaattttgaatcttgaaatgatttatttatggtataagtggtattaattttttgcaacgtgttgatcttcagcatctagtttctcactgaaatagattcaagttgtgatcacatagttaagtgagacaatgacagatttttaggtttttagggtaaaagaaaacttcatcaccaaaatcaatttaaagggatgcttaagctgctgattgtgaagtgaaacaactcaagagtatcctggatgttcggataaatttactagtttttcatggacttgaaaaaataaaataaacattcgttttatccttataaagatggagaagaaaaatacaaaaatcagctgggtgtggtggcaggcacctgtagtcccagctactggggaggctgaggcaagagaatcgcttgaaccctggaggtggaggttgtggtgagccgagatgttgccattgcactccagcctgagcaacaagagtgaaactttgtctcaaaaaaaaaaaaaagatacaaatctatattttccagactaaataattatgccttttcataggtttcttaaatccttggatatattgctgaatttcacaaaaagggacaactttattctttaccatccagagcggtgggttaatttatgatttgacgatctttgttccctggcagcgtggtgagacggcactacacatggcagcccgagccgggcaggtggaagtggtccgatgcctcctgagaaatggtgcccttgttgatgccagagccagggtaggtactggtgccctgaggttctcttctatcgcagcgcatgagtttcatccttaagagagggtgttgcccttcagttccttgatttggaaataccagggactgtaagtgaaaggatcaattcaatagcagttttccagaaaaaaaaaagaaacattatttaagcaattacacacgacgaaaaatgcacccaaatttcagaaacattaacatttgaaaaaatgtaaaacttatcatctaagaaatacatcgactgatattttaatactgttttaacctcggaaagcactttctcatatctctttattttcatgaattttaaaatttaacctaaagtatttagatgctatacatattaaaatttatttcttaccacttaaaccaatcacatttccacagtcatccctcactagttacataaaatcaagttattctccaagttttagtgtttttccttcatctgtttgccttccctcctttttatgatatttacttttcttcttactctgattttacaaatttagacattctgtatttccacagttccaaaatagaatttgggcactgaagattgcttgatcagacttgtcctgtttctaatagcttgtaattccttcacaagtttctttttccttctttttctgtttttaaatcttactttccaatttattttctcaccttcctttacattgaatacaccagaatgcactgaatacactatcaatatactgtaccttctatttccttttccatgtggtttggttaacttttgcactgacatcattgagattctcatgttaaataatttccctccttcttcaatatttgatatacctaagttagagctcatttcagtttgagttgtaccattataatacagtgttatcttggaatgaaagcatctggctatggtcatataaattgtaagtgatttcaggcaggtcacttcactttcaagtctttctttaaattattattatactttaagttctgggatatatgtgcagaatgtgcaggtttgttacataggtatatatgtgccatggtggtttgctgtacccatcaacccgtcatctacattatgtatttctcctaatgctatttctcccctagccccctacccccgacagtctccagtgtgtgatgttcccctccctgtgtccatgtgttctcattgttcaactcccacttatgagtgagaacatgcagtgtttggttttctgtttctgtgttagtttgctgagaatgatggcttccagcttcatccatgtcctgcaaaggacatgaactcattcttttttaaggctgcatagtattccatggtgtatatgtgccacattttctttatccattctatcattggtgggcatttgggttgcttccaagtctttgctattgtgaatagtgctgcaataaacatatgtgtgcatgtgtctttatagtagaatggcttataatcctttgggtatatacccagtaatgggattgctgggtcaaatggtatttctggttctagatccatgagtaattgacacattgtcttccacaatggttgaactaatttacactcccactaacagtgtaaaagtgttcctatctctgccaggcatggtggctcacctctgtaatcccagcactttggaaggctgaggtgagcagatcacctgaggttgggagtttgagaccagcctgaccaacatggagaaaccctgtctctactgaaaatacaaaattagactgctatggtggcacatgcctataatcccagctgctcaggtggctgaggcaggagaatctcttgaacccgggaggcggaggttgcggtgagctgagatcgtgccattgcactccagcctgggcaacaagagtgaaactctgtctcaaaaaaaaaaagcattcatatcctctccagcatctgttgtttcatgacttttaaatgatcaccattctaactggcatgagatcatatctcattgtggttttgatttgcatttctctagtgaccagtgatgatgagctttttctcatattttgttagccacataaatatcttcttttgaaaagtgtctgttcatatccttcgccgacttttcaatggggttgtatgttttttctcgtaaatttgtttaagttccttgtcgattctggatattagccctttgtcagatggatagattgtaaaatttttctcccattctttgggttgcttgttcactctgatgatagtttcttttgctgtacagaagctctttagtttaattagatcccatttgtcaattttggtttttgttgccatggcttttggtgttttagtcatgaagtctttgcccatgcctatgtcctgaatggtattgcctagttttcttctaggatttttatggctttaggtcttacatttaagtctttaatccatcttgagttaatttttgtataagacgtaagagaggggtccagttttagttttctgcatatggctagccagttttcccaacaccatttattaaatagggaatccttttcccattgcttgtttctgtcagatttgtcaaagatcagatggttgtagatgtgtggcattttttctgaggcctctgttctgttccattggtctatatatctgttttggtaccagtaccatgctgttttggttactgtagacttgtagtatagttcgaagtcaggtagtgtgatgcctccagctttattctttttgcttaggattgtcttggccatatgggctcttttttggttccatatgaagtttaaagtagttttttctaattctgtgaagaaaatcaacggtagcttgatggggatagcattgaatctataaatttctttgggcagtatggctattttcacaatattaattcttcttatccatgagcatggaatgtttttctatttatttgtttcttctcttatttccttgagcagtggtctgtagttatccttgaagaggtccttcacatcccttgtaagttgtattcctaggtattttattctctttgtagcaattgtgaatgggaatttactcataatttgcctctctgtttgtctattattggtgtacaggaatgcttgtaatttttgcacctggatgttgtatcctgagactttgctgaagttgcttatcagctttaggagattttgggctgagatgatggggttttcaaaatatacaatcaagtcatttgcaaacagagacaatttgacttcctctcttcctatttgaataccctttatttcctccccttgcctgattgccctggctagaacttccaatactatgttgaataggagtggtgagagagggcattcttgtcttgtgcagcttttcaaagggaatactttcagcttttgcccattcagtatgatattggctgtgggtttgtcataaatggctcttactattttgagatatgttccatcaatacctagtttattgagagtttttagcatgaaggggtgttgaattttatcagttttttctacatctattgagattatcgtgtagtttttgtcattggttctgtttatgtgatgggttacatttattgatttgcatatgttgaaccagtcctgcatcccagggatgaagctgacttgatcgtggtggataagctttttgatgtgctgctggattcagtttgccagtattttactgaggattttcgcattgatgttcatcagggatattgtcctgaaattttctttttttgttgtgtctctgccaggttttggtatcaggatgattctggcctcataaaatgagttatggaggagtctctctttttctgttgtttggaacagtttcagaaggaatggtaccagctcctctttgtacctttggtagaattcagctgtgaatccgtctggtcctgggctttttttggttggtaggctaattactgcctcaattttagaacttgttattggtctattcagggattcgacttctgcctggtttagtcttgggagggtgtatgtgtccaggaatttatccatttcttctagattttctagtttattggtgtagaggcatttatcgtattctctgatggtagtttgaatttctgtggggtcagtggtgatactcaagcctctgtaatggcggacgcccctccccctaccacgctggagcctcccagattaacttcagactgctgtgctggcagcgagaatttcaagccagtggatcttagcttgcttggctcccctggggtgggatccactgagctagaccacttggcttcctggcttcagccccctttccaggggagtgaaccgttctgtctcactggcgttccaggcgccacggtggtatgaaaaaaaactcctgtagctagctcaatgtctgcccaaatggcatcccagttttgtgcttgaaacccagggccctggtgatgtaggcacccgagggaacctcctggtctgcaggttgcaaagaccatgggaaatgcgtagtatctgggccagagtgcaccattcctcatggcacggtccctcacggcttcccttgcctaggggagggagttccctgaccccttgtgctttccaggtgaagtgaagccccaccctgctttggcttgccctccatgggctgcacccactgtctaaccaatcccagtgagatgagccagatacctcagttggaaatgcataaatcacctgccatctgtgttgatctcgctgggatctgcagatgggagctgttcctattcagccatcttgccagcctccggccacttccaagtctttatcagtaaaatatgagggttggactcagaaactcaaaactcctttctagactttcttaacattctttgattcaatgaatttaatagacattttcttgtaacaggttccacagatcttcatgcagaatccagtgatacacgggtagccttaacattactcttgttgtcttggttttcatctgcctttctgtgcattgtccacatagtgtaatttatgttctttggtaatcatcattgatctattatattcttatctatttaaagctttattcaaccatgagcttcccctgccataacatttttctggtttccttttaaggttacctggcattcagctatttgaaaaatattttctatggtcaaccagtgcactctgactatcgtatactttactggaaattgtgttgatgttcctgtaaattttttgtaattcgtatttaataatgaaagagtttcccatttctgtcttaaagtaaaaccccttaatgtttattattcaaattaaaatttctacttttaatggaaatttattcattttcatgtgtctctgccaaatttttctgtattgatataacccattattacaaccttttatctttttggataccctctgaagcctcttccttaaaagcaccactggcaacagagtctttcctttaaaatattaattaattagttaattttacacaaagatttcatcaattctacttttttacttctcttttgcaactacatttagtatcattaatacatatatagctacctcttaattccttattccttctaatttaaatatcaaatttcagatgttatcttttgtttattttttttcttttcagctctacctcccattctaagctacaactgaaatcccttccctatagcattttctattgtgaacaaacaaaaatactgtagccttgtgaagcagtgctccctaaaggtcaatatgcatacaaattacctgggcaccctgctagaatgcatattgtaagtcagttctgcatatttaacaaactctcaggtgatgtcagggctgctgattttgggattatgtttcaagcagcaagaagttagggttttcctattcataagtcctattttaaagcgtactttcaccatgtgtgttttattgtcatttaatccttttaatgtgttcctgggcctctgatttagttaacatttgaacagtgctttagaattcatcaagcatttaaacacaaagtgtcttatttgatacccagaggattcctgtgttgtagggtggcttagcgtcctgaaattcaagattgtgctgattaacctgtggtgacagagttaagataagaaaaagatttctcctctgattccgcatctttctcctaactctttctgctaacgtcattatctcccacttcaaatgtaaagagagcccctcttcctcccatccgaacaaaccactggtttctaattagtcacattctttccctgagcttatgactatgatcaggataaaagatcaagcttgggctcatgcgcattcatgcggcccatttatgaggtgggataagaagaccagcagcccttctagaaccacatggaatatgggatgtccgtttcccccaaatgagggatggctgtcccagaagaagggtgcagggggtattgggcagaaaaatgagcacatatctgctattttacctcttgatttctcaccgcacgcatgcgtgcacatgcacgcacagacacacacacacacacacacacacttttggaaacttcctctctaaacctaataacattgctcgagaattcaccctctcccgaagaagagatagtaaaaaattgtgccaagctactacattgagctccaaggttgagattgctgcgtagttcacaatcttctcaatcaggtttagaaataatatctcatgggtctaagtcatatgttttgcctattcacaatatataacaaaagaaaaaccatatactcataataacatctgtaatttttaaagttcacgcagaacactctattcaccagtccagagcataagacacattttgctggacagactggagagcaggggaccacagtggcctcagttcctctgtcagccaatgtgtttgcacccaggtcctgctcgcaggaaggtccttccttgtccagtgtcctcagtggacattactgagaaggccaccagagcctgaccatctgggagctctcttgctttaggagctggttctgttggcacaattacagggcttggcatttgctttagggatcgagcaatcccaggggtcctaggcttaaactcacttgaaacttagctcatttagaactttagttagatactaggagatgtggctcctgggaaccctgttagctagtaactagtaatagaaattttatcaaatctttgaactttatcccagccagtgttatttttctctttgtaaaaggagctggggctcagcaagtctccagagtaaaatggtagactgcagtggcaaagcagagctcacctacttccggtccaggctgtgtcagccagtgatgctttatgatgagggaattgttgcctctcatttttggaagaggtctatgtgatcaggcttccctcgtttctttaccttttcccatgaatcttttcttctgcacttccccaattcttttccctggtttaaattaacattacccttaagcagtaaattcaacttttgcaattcagcagggaaataattggccaaacctcaaaaagtcttatatccctggttacaggttgaaagattttctttgcaaaatttgcatgttatttccttttccactttcaggtaaagctttagcaaaaatggaaaaaagtaggcaagacatcctattttttaacttttttttttaaagaagaacattaatgctatacagtctaagaaccaaggatcaatagttaataactaaccaattatgtagctacctctagtcaatgattgccacttctcagctatggattaaagagtcatcattgctccaactatccctcttactcatggaaaatctattttagagtgtgtcacttgcaatacccacccacctttatcaaattttgcaggacagagatctgagaagggaaccccagaaacaacaaatgttcatcatagctattctcaagttccttggtttttaaattgttgtttgttttgctaaccatttatttttataaataaaaatatgttcattttatttataaataaaaaatgtttattctcccaattcctctatttttttcctctgtatttcagagaaattttatcttctaatgtgttgtcagtctcctttcctactgagagtcactttgttccgacaggtctgttagtggccatcttattgtagtatctgtttccaaagaatgtataggcagagaaatgtctttagaatccaatgccctgaattcaagttctgttttaatagctgagtaaccttggacaatctttgagaacttgtttaatttttcttaatattgacctggaaaatggtctaataatacattttatgctttccttttaactctgttagaaagatgggtcacatatgcattgtacatgaagaaaggttttcaattgcaaatgttcacaaaatttcaattctagtctaaaataatcatattactgttatttatttacttcttactaccttggaattcatgcagtgctattttatctcttcctatagctcctcttcttttttcttataactttaagatactgcatgtttttggatagatctttcttcctctatatacttttctccattcattcttagccctgaaagtcagcccagttttcccttcctcacttttattatgacatgcccttgggcagatagtaaagatatacctctttttatcactaaagttacactcaattttctttttacaagagaatggtttggcctggttctctaaacactgaaaacattatttccaactacacttcagagtcaggtgattttcctgagcctcctggaacatgtccttcctgtcccttagacccagctatatcctctgtttttaatggaaagtacttggcaaatagttcaccctatttgctttttgccagagccccatttcattttttaagttctggatgcaagttccagaactatctacagcattttctgaaacatcttttaaaaccagattacaatatcttctttgtgcactgtttctccttgaagaaaatgaccagcatttgtatccttggcttgctgaatggagtaaaatcaaagattttccagcatccctggttctttttctttgaaagagttcccagaataaatcctgtttctaagtgaaaactcttggatgagaatataggtcctaggacttttggactagattttattcttattccaaaccatcagttagtttatatttaaacataagtgaggcctaaagccttaatgagttgagaaatatttcagaaagcagtgatcaagttcatggaagtatatgctttttaaaaatcaaagggagactttgtgaccaacagggtcactgctgtagcaaaatataaaatatgccatggttaaagcagtaatgattttcttttgggtggggttcctagagattccaagaagacatcatgaaatatgtgagtgaaacatatcaccagtgaagttctgtctgcccggcactaactttttacttggcttgagttgtaggaggaacagacacctttacatattgcctcccgcctgggtaagacagaaattgtccagctgcttctacaacatatggctcatccagatgcggccactacaaatgggtacacaccactgcacatctctgcccgggagggccaggtggatgtggcatcagtcctattggaagcaggagcagcccactccttagctaccaaggtaaggagaatgacatcatgagaacatggaccaagaggattcctaagtcatggcctttctgctctaccacatacagaatcaagagggtagatctcctcaggccttgacttacttccttctctacatatttaagactcattgtctaaatgatttaatagaattgtgagattccgtatatcttcaataaagagtgctgaatttcattctaattaatgccaatgtttctaggacaggtatctagtactctaagatgattttcactttttcttctcttttattataaaatccataatatattcttaagaaaaagataaatgaaatccctaaatatattgaactggtaatactaatgaggaagagggtactgcattagattggcagtactatatttgctgtgagttatagtaccagatcgaagctcaatttacttgtacattttcgcaaccctactattagccaccacttatttgacattctcattcccatattagtttccaactttaccaactacacttttgcctgggtatttacagtgtttaaagagagctgaagctggaaaatcacacttctttagttgttattgacatcgagcaaagaattttacttatgttccaagtttcatgacagggcagagtaatttttcccatgctttatacatgctgtttgacattcataatttggagatgacttagaataaaacatgaatatactcagctaattagagcaaaattaattgagccagtgcaagtgaatttgtcatggggcaaaataattcccacaaatgtaacagtgattcagattaatgaaaggacaatttcaattctctcataatcagtaggtataagtacttcatccagggagagggaaagttgcaaatttaaactgagatagtgatgtggcatctgtcctcttgtaagtaggagcagcccactagctgttatggcttatctggttgcctgttatgacttacctggttgcctatggctgtaaaaggtattttgatataagaaattgacaattattgaagttctgaactctgaaaagttggaaggattttaaaagttcttaaaaaaaaaaaaaactaagcaacaaatgtagtaataacctgagagatttggtgattgtcttatcagaggagggtgtaaatcatcaaaattaagatacataaaatacagaaatagataataaaacgtagtcttttgtctgtcaaagatatttaggatttaaaaaatataactatatccatggtaaattagggcgataaaatagaataaaatgttaaacagtgttttttttttttttttttttttgagacggagtctcgctctgtcgcccaggctggagtacagtggtgcgatcttggctcactgcaacctctgcctcccgggttcaagcgattcttctgcctcagcctcccgagtagctgggactacaggtgccctccaccacacccagctaaatttttgtatttttagtagagacggggtttcactgtgttagccaggatggactcgatctcctgacctcgtgacccacccacctcggcctcctaaagtgctgggattacaggagtgagccactgcacccggccaaacagcattttaagagttcagctgactagggctgaacagtggttgattcatcattattaaagacatttaagagggtaaatgaaatcttggtgagattaacataaaggaagaaggcagatgtgtgactcaagagatgccttctaactttggttttgttattctacagtagattttatgtatttttgtctaataatcatttccaaacttataagagttggatcactattctagcaagactttaaagataaggagtttatgttttcttcctcatgatgcagttagcctcaaagaactctgtttcatcctgagtatcaccctaatcattgtgtgcattgagtggagggaggagagctctaaccacaaatgctggtttatatggacaatgcaagaaggaataaatacttcctacgtttgtcccacacttggaaaaaaccagaagattcgctctcttccaaggatttattaataccaaatgttcaaaaaagaagcaaaaagaaaaacgtcatctcatttaaaaataatttgtctggagacaccgaaagggcaatattgcttcttgggggatattctgtgtttatgatgggggcttaaatggttccaggataagccatggcttagagcacctaacccaggcatatttgctatgtgttttacaggccctgatcggtgttagaattcccccactcccactgtagtgccagaagagcatgtggttaaactgtctggccaagaggatggatttgacatcatggtgtaggaactgtgccatcctcgagatcttagtccagagacttatctgtatttataacacactgctaattacagagtaaggccattggttaggcacggaagacactgaatgtacacatatcaacatgtgtaggagagcagccctctaaaaaaagctctaaagcttcagtgtgtttaaaagtctggtgttaatcagcccaacatcatgccagaagtagaacgtattttacaaaagcaattggtcttttagacagtgtgagtcttttgggaaaggggacaagtcaggatgggagttgctttttaatagtacatgttttttgttctatagaccatttatcttgccatttctgcagaaaatatgtcaactaattcacgaatacttgtttttactatggctgccaaaatatcctaaaatttaaatgaatttggaattcaggtgttataaaaaggattgaaagaaagagaaggagggttggagagaaggcagctgttgtttcaattctattaattttagaggcaagaaaaggctttttttccccattcacaaattggagccagtttactgacactagtggcttttaaaaatcccaaacctataaagtcagatttcagtctccaagcccttaaaataaaatttcttttattcagtctatcaagccaaacttttgtatgttaaattgtattctttttctttgtccttgttcatggctaacagatttaatgctaccagtattttttccaaatgaagaatcagtatactttgctcaatatgttaacaaataaaaagattttttgaggagttacaacaataaatacgattttacttttgtttctcacattttcagaagggttttactcccctgcatgtagcagccaagtatggaagcctggatgtggcaaaacttctcttgcaacgccgtgctgccgcagattctgcagggaaggtaaagattttctatacgttataattatgtaacagtgaaggtgatagattaggagatctgtaaagacatttttctcacttctctgaaaggaatgtgagagcaactgatgaaactatcccaaatagacatggtggcgatgtcttccatgaccgtccaggtacatacacactgattcagaaagcattttgagctgtgcctcaaagtcttgtcacaacagccccagaaagtctctatattaagaagaatccctgcaatgttaatgtagtatttcttacatagcagtttagacctttttacattgtgaccctcaagatcccctttgctggtggtatgctcattttcaattttagttatgtttttaatatgaaaattattagggatttgtttattttcgttcttttttctattgactatattaattcattaacatgaatttaatcaatatcagtttccaggcatcctggtagcttcagggcagctaaccctaatttattaatgctgaaacttaaacacaccctttacagaacggccttaccccgctccatgttgctgctcattatgacaaccagaaggtggcgctgctgttactggagaagggtgcttcccctcatgccactgccaaggtgaggaccacagaaaaggatttacaggcatagggtgtaactatcgcctgaaaacacatgagaattgtcttttaaacacatggtatagtataactgcgactagtcctagcgatagtagcttttggtattgacacccttttttttcccttgtatttctgccagttgcgtcttgaaaatcttttttaagattttttaagagtcagcaaatattaaggggatgtgcctataaaccagtagagatgaatcttattgctaacattctgtgtgttagagaatgaagtctgaattttgagaactgagaaataaagtcattaacatattttctcttctctcctataaaccaaatgctatgatgaaaatgtccttttatactctcattctttccgacttcaaacttctatttgtttctttgtctttttttttaatgttttacctgtgttaactgtagcatggatccctctaagtccctagattcagaggtggtgggaggatgcctttttggtgtatatctagcaccaaattccgaaacagctccaactaagacttgtacttacggacagggcatttcccaccattctagttggccccttattacactgaaaatatatatgaatgtcgtataatgcataaagtcctcattgcgtctttcgttcattaattaagcacagctattttgagaacacatcagggtttatttaaaaaatattgattgtaatgggaaaatatttatgctatattagacaatataataaaaaaactgccaccatttatttgccaaacactatgccgagcactttacaggcaatatctcataataaccccatgagactggtattctaatgatctccgttttgcagatgagaaggtgagatttaagtaggttaattttccaaagtcatatgaataataagtgttagagcttgtacctgtgtttgacctcaggcagactgactttagagccggtgctcttaaccactaggtcctttgtgccccaaagcaatagagggagatttattccacttctgttatacaaatatatacatatatactcatatgcctatttaaattttatacatattataaataaaaaataggatatatacataaaatatgttctgtataatatatattttatatataaatatattatatatatcataaatatataactttgtacacatacatacatatacatctacatatatttatatctttttgatgccaataaacagtttataataaagtacttgaactgtcaaaagagggtgccaaatgttcataattatccacactgttcttactcctcttttttctacaacctcatcaattcagcacatattttatgtctttctttacactagattataagctactagaggagtgttcatatcatattcatttgcatatctatgaggtgtttaataacatatgtgagttcccaataaatttggatgaaagaatgaagattgagcaactatggaataaaaatatacctgctcacttaacataccagcattttttttttcattagctttccaggctgaccattctcaacatagatacaaaagacttcattagtactcatgagtactttcgttgaactcttacaatgtgcaaagaaaggattataggtactcaatgggaggtaaaattgtaaaacgtgtgttctctttccacaagggactctcaatctacttgtaagagaagacctagattataaaataatgtgtatagttttcctaaggagataaacatagccttgatttctagcctctaccttgtatggtccttaatcttaggcatgcacgtaccgagttcagaagatgacataaagcatttgtctactccagagtccacagtaggatgggtattctgggaatgcctctctagtgtctttcacttatctgccccagcctgtcaatgaacatgagcccttcatctttggggccactcctagagggctccagatggtaagatccccactgtagtctccactttagactctctttctgctcattataatgtctcctctccttaatacacacggtcctttggccacgagaactttgcttctttccaccagagtccagaaccttctcttagtctttattgggagtgctgcaattatttgagtccaaaaatgtttcctctttgtggagtaagagggcttttcagatcttgtaggttgagtatctaccaggcaaacctcctccattgccagaattgacaccttctttgatgatcgcttatgttgttttgctaaaatatccctgtacctaaccttagtagagcccatgctgtaggcagtggggtaactaagactaaagaaacacattgtagcaaaaagaagttgactaaacttatttggtccacaaaaatctgtgtgtcctttttttcaatagagtctatggacacaaatacagtattttgaagcatctgggacctctgatcagaccctgaaaaggcttccaagctgaatttccttcagttgcttcaggagaaacattgtttgtcaaaaatgaaagatacttattcttgcttggagaaatggggacagagtagataatgtagggttgtgtgaggatcaagatttgatgatagctcataaagacatttaaattctcaaaacacttttttattttttggtacactttgcagttagctttaaggaaatagcatgacctaaaaatacctctcaagtttgattacaggctcaaacctgtaatcccagcactttagggggccaaggtgggcagatcgcttgagctcatgagtttgagaccagcctgggcaacatggtgaaaccccatctctaccaaaaatacaaaaaaattagccagtcatggtggtgtgtgcctggagtcctcggtacttaggatgctgaggtgggaggatcacttgagcccaggaggtggaggttgcagtgactgagatggcaccactgcgctccagtcttggtgatggagccataccttgtctcaacaaataaataaataaaacatctcatggtaatctcacaagaagcacttggtcattatgctctctttcccttcagcatgtcactgaagggaaaagccactgtttttaatttctatcacacattttgaatggaaaattctaccggatttgataaagaaaaggaaataaaacaatatatgttgcagacttacagttgttccacatttttttcttttaactaaacatggggtatagagttttgttcttgtaagcagagtatgagttttcctgtccctctccacaaactcccgcccgaaataagtagcctcatatttgtactttcaaagcagcaggttataaagaaggggagatctaggatttgaatggaccacaagattcatataagctaattttgttgttgaatatattttaaattagaatgcaacccattaaagacagggatcatgtcatgttcaccattgtattcccacacctagcacactgctcggcatattctaggcactcagtaatatttgttgaaccagtttaaagtacaatccaaacagaagcatattagttggagtattatagtaagataatagaaataattccatttgattctttatgttataaccatatgtgaagtgtagccttggttccagatagcacacacaattcaagagcaatattgacaaactagaatcagctcagaacaggtcatccttatagggagagatctagaaatggcacttccatcaggaatggttgaaggaatggagaaaattaacctggaaaacagaaaactaaaggtggatatgaaaatcatccccagtatttaaaggatggtcatgtagaagaggaacctggcttatcctatgttgcttttcaggagagaagcaatattataaggagagaatttttagttctggagctttgatgtctatatctgtcttacagtagaatggggtgccttgtgacttttattgtagagattcggttattgttgaatggaaacgtgatgagtaagagtttggattaactgtaaactcacttttaactcttctattgattagagatttttatttcctttagagatacgtattagagcaattgttaatcttactctatatgcatgtgttttatttttgttctttttagaatggctatactccgttacatattgctgccaagaagaatcaaatgcagatagcttccacactcctgaactatggagcagagacaaacattgtgacaaagcaaggagtaactccactccatctggcctcgcaggaggggcacacagatatggttaccttgcttctggataagggagccaatatccacatgtcaactaaggtattctgtcctttcttgcatcaatcaagagtgttttggatgcatgtaaacaggaaccaatcgcagacagtttggaacaaaaaggagcaatgtattaaaaagaaacagggatatcttacagaccccaaggacaggaagggagtcaagccttatgagagattagaaaaccataaggaagcaagggagagagactctctgtatggcaacactttggcttcttgacttttctatgcaagtcagtttcattcatctctacatccccgctttccttgcttttctctgtgtgtctaaagaggctaccctgtagctcccaatgttaacatcactataattgctccagtgtctgctgctcctcattctaaatttcatatgtatagagagagaaagaatgcttccatctggggtttagcttaaacaactgcctctaaactggcaggccgatgttcaccacccaaggcattctttagtcctgctgggcatctgaggcacctatggataggagagaggaaactcaataaaatacagatttttttccatcaacgtaggcctagcttgagaggtttggtggtggtggtgagaaaatcatttttttttaataaagcacatcagtcattttagcctttctccagggactggcctctatagacctccgcattaattataatacaatggcagtcaaagatataatggaaaaatattcaaatataaaaatatatatttttacaagtatatgtcttttgatacatctatccatccatctacataaagacctatagatccatctatctaactttctatcttacacttatatatatgctgctatagccagctgctgagaaacacagaattggaaactgtatttattaagttggtctgtcatttgatgtcttgatgctttttgtaatacattatatgagcttagtgaaaattacgtttcttagctccttccataaatatacaaatactctatgttttctacatttcattgttagttggtacttttaaagtatcagtgataagttggtcttaatgacatttgtaaataggttatgtagcatgcatccttcaggaagagctatgaaacaggcagattgccttgaatacttctgcagtcctagtctattttcttgtcactcagaagtgttcctgtacatcccctgcccttacgtacttctctggcctttataaaaagtccccacaaatccttttttaaagcacgatgagagcaaattatagggttagtcttccaaaggatagttgcatttttataagaacgaacacgataaagccttatagtgaaattccgtgtatcagatggacaatcattacagtctagggcatgggcgtccttgtgactgttgacgtcatgtcattcaggtggtcatttaccctgttggagaaaatgtgatcatgaagcatagaatattttatttagtattagtgtatgaagggggcatgtgtttactctattaataacaaataaatcttcatttgaaaatcagccaaagaaatccataaacaattcagcagtattttgagtaggattaaaattccagatagttcatgaaactgatcttacagtgcttctgatggtgttatttttaatttataaaaatgacaagtacatatctgaaatcagttcactatgtcctcctttacggtattcttctaaatacattactttctttgacagcgttttatcagttagcaaacatttaaggagtattttttagttgcacactcagcaatgaagaaaaacattcaattttgaatcacaaagtaattttgttatctttataacaatgatttcagtattacatgtgagtggtgtcctaaacacatagtatgtttatcactagagtaaaactttagtaagtttacacagatatatctgaataataatacaatatacaaaatttacataaaacatataaccttgccttttggttagaattataagataatgcaactataaaaatatctcagataagcagcaaaactgataaaataatttcccattgcttttgaagaaaacatatattcttttctttttaaggccaactcaataatttcatagtctccaaatgattatttcacattaggaactataatatagaagtgatattataatcattgtccaaacaccatctatcataaaataaaaccaaaaaagatccgtcgttgggtccaccagtgtgtcttaggaaataaattactttttttgaaaagaacttcaacactttctattttcttgatttattagaaaagttttttttttttttccagaaacctttcaaacagtgtttttcctctattctcacacctaccacacaacaatcatcaacacagaagacttctgtgaccaaatgcggagaggttttccccacataccaagcagcacacaccagctggtgtcctccaattcagttctaacactgtctatctggagagagtgttagatcccttcagttgagggctcagtccccaagactgccctctgcacagacaccaatcacaagtctgggcctctgaacttctgacctactggcttcaagttggggttcccaggacactccctttgagttccattaattcactggagtggctcacagagctcacagaaacacttacattcacagtgcttacagtttcttataaaggctattacaaaggatgaagatgaggagacacatagggcaaggtatgagggaaggcacacagcttccatgcccttcctgggtgcaccaccctccacaaggaagctccaagtgttcagctatccagaagctccccgagccctgtcctctggaatttatggaagcttcatgatgtcagcattcattcccccaggatataggatgggactgtctctctcaggagggtcttatgatccacaaatgctgggagggaagattagagcctagccttagggaaagtgaaaggaggccgggggaaggtgggagatattttgtttcctgaggcctggccctgaggcctaaaacgcacaacgttataacaaaagactgtaataacggctatgggagttatgagacagcaactgtggacaaaaacctatattcactgcagtttacatcctttgatttggatatgcaagtttaccacaataaactgcagagattttcatactggttgttagtttgtaatcttgcattgcagaaaatccattctgcaaatagagcagaaaaaagcacacatatttaaaagtcatcaaaaatgtctttgagatttgatgatcacttcatgtgatgatcacttcaataacatttttaaacagactatctctgtaaagagaaatattctgtttgttattttagtaaggagaaaattaagaaagaatcttgttttatcctaatattcacattttttatacattaggattaaataatatttgtttagaagtgaagaaaattttaatagaaaaggatacaccttctatctcaccctgtgttttacgaaactcaaagttgagctcacccagagctctcaggattaaaaagctccaggcccacaaggaaaaagcctcctctcacgttgtagaatggttttctctctctaggtttcacttacatttttgaaataaggtcagtgtcctttttgatttccagaagtagcaccatggctggagatcatgaattttgaagaacatggcttagctttctcagcctaagtgctaatgcaggagagtgggcctgaaaagttgtggtcaacagggctggtcaattttaatcagatgtgaactggggaagaggtgctgactcagagcccaggtagccacctcagtctatagctgcaggatgtccaggaagagcataaatatactaggcatttgaacaatagtgaggggagagaaatatacagtataaatatactgtaggctagaatgtaagctccataaagacagaaacttttgttcactgctgtattcaagtgcctagaatatgaacacttcatgacatatgaaacatactcaagaaaacacccgtaaacatgtaaggctaccagagtgtgacattggctgaataagccactttcccccatcttttctccatgcctttctttttttattattaattcataactgtaccttaattggatattcaaataattacttgatgtatatataccaaacatgttgcataaagctgagcagttgatggtgctgtataaataatgaggttactttaaggtaatgtttagaggaacctcctgaaaagtataccctctttgggtgctggagaaagtttttctgaactcatttcctgtaactgtccattttttacactgatgtgatattttgttgataaaatatagatgattattatgcttataaaataggtgtaatagttggttgatcagctatttaaataaataagttgatacagcgggacatccagatggatttgaaatacatgccatttgaaagcttattggctgtgctattttaaagtctcacatcataatataagaacccattatagaaaatagaaaatgtaatttgcctgatgtgttgattgacttagaggacatgtcttagaggaaacaccattaatttagagagtttgccttgaatatcagaagatatagtttctgggaagaggctatgagttttccaggatattttcaatattttcaatattttttcataatattatagatgatgcaatgtattttcttcttcaactgtatccctttggttccattctttctgtagagtggactcacatccttacaccttgcagcccaggaagataaagtgaatgttgctgatattctcaccaagcatggagctgatcaggatgctcatacaaaggtaaagcaaatcactctcagtattgtgacaggttctggctgggatgattcccagtagcccccattcgggtcaccccatgtccagggtcttccctcctcaagagtccattctgaaatataaactaatcataaccctctcctatgcacaaatctatggtggctccccattttttgctagaatcaagtccagtggatagcatgaggtcaggaccctttgcaggaagactccaattttgcagccttaagtctatcctctctcttactgctttagctagttcacatgacttgctgcgttcctcttctatttgctcatctccatgcccttggtctggaaatggattttccctctctatgccataaaattcttacccattctttaagcctgctgtagctacatgtttcctgcatctcctatcagagtcattctgtctttgctgttttcagatattatttatgcctctctcttagttctttgcagattttgtcacccacatctgatctctcttgctgatatgaagttccctgtggtcaggggcacatatataatctgctaaataatatctttagtcaaatggaatcctataataactgatactctacccagtccttctcctctggggtattaaccactagagtagtaaagtttctactttatctatttttaactttttattattatttacagcttggttacacacctttaattgtggcctgtcactatggaaatgtgaaaatggtcaactttcttctgaagcagggagcaaatgttaacgcaaaaaccaaggtaaagtacttgtggtcattttcaattcctataagcaaaaaggttcagccatctggatgcttcactagtttaccaaagctacaagtgtatttttttcttcctttttagttctaaagtgattttgacgaggtgatgtagttttgtaattatttgagaattttcattctaataactttgacatccatgaaggttagcttcgaactacttctattataaagttaaagtagctgacatcgatttaacaacttactgcaggatacaatagatgccggctagaacatcttgatgttctggcagatttcctttacattgtttcagtggcttggcccccctcccctgaccccttctcctctcatgaagaaatacagacagtcagcctagactgcgtgcctttcatttttaatgaactctgtcacattcagaacatcacatggacatgctcagtgaggcaataatgtataaggcctgggctggaagttctcaaggataatgcagagctgacttgatcccagcagtttccccagtggcatttgaaaggtcctattcagcaaagcaaggttggaacataacactttacttcgtgcactcaatgtggttcaaggtgaatagaagttcatattgtaactgtggctattatgcatactataacttgcagctccaagttctttgatccaaagaaatatttgtttgcacatttatttaagttcatatatcagaaatttctttttcttttttttttttttttttaagacagggtcttactctgttgcccaggctggaaagcaatggcacgatcagagctcactgcagtctagaacctgggctcaagtcattctcttgcctcaggactggctaggactataggtgcatgacaccatgcccggctaatttttaaaagtttttgtagagatgaggtttcactgtgttgcctaggctggtctcgaactcctgggctcaagcgaaattctcccaccttggccaaccaaagtgctgggattacaagtgtgagccaccaagcctggcccagaaatttctgactgcagctatttgaatgggctcaagtaaattagtgtgagcacattcaggacttttcaaagccatcattcaagattctataaattaaaaatatacagaagttttataagtcagtctttatattctcttagaagcagaaacaaaatcatttctatacataagcatgtttatagctaatttaaaataaacttatttttaaactataaataatactattaacatttaagatttaaacttataatcttactctagcaagaatagcttgctgcctagtttctgaccagttcttaagttctcatgaaattgaactttgagacttatttaaagcctctaatatgaattctcaggcattagctcctaaagccttttctgatgagccagctcccatataagcactccaggaaagacattttggttggaatccaagtattctcttgaaatgaacaaatgcaacagtacagtgagatgttggcagggcttgaaaatgcttatcatatttttaaatgtttcattgttgaaatggttataatatttagtaggcaaacactatattgtctagagaatatcaatggtctccctggagtttgacctgcactgaatgaagatttgattgaaagaaaaatctcattttatcatttcagttttttttgtttttttttttttaagtgaactaagttgcttgcagtgttacatttggaaccatatatctttagggaaatagatacaaacctcaaaggacagtcttttaataaactcttcagattttttttcacatgaaaatgacatctttgggaaaggaattaggttttcttcctcatatcttatgtgtagctgtagttactaaaaatggattcattgctttaaaaatgtaaacatatacattaactttactctgtaaactctcatgatgtggtataaaagatttggcaaaattaacttgttttataagactatttgttgcttaaaattagaatgaaaccctgttatagcaacttgggacgaaccagacctggttaatcatatatttaatttgtgaagagggtttagaacagcacatgaaaaaaattgtatttattaaagacactgtgaagattatagagctcttcaattagaaaaacaaacaaacaaacaaacagaatgaaaacaacaccaccaaagtgattgctaaaattttgaaagctagaaaataaaacatattcatgaacaacttatcttatccttcatcaaacttgaaatcttggccatttccatttttcaaatgaggaaactggggcttagagaggattaagggtttgcaaatgattggtagcactgggtctagagctcctagccagatgggcctatgacagtggattaagaatcaaccaaatgtttacgtaaacacttctgaattgctccagacttccctggcaaatatcctcactggggatttcaggtaaaggttagattaaatcagggctggggaacatttttgtggccacaatgtccactgatctattgagggcaagaacgttgctttggcattattaatttacatatatttatagataatttaggtttgtttatatattatagtgatatattattttattaatttacatgctaagttatttagcacatagtgtgtgattagtaaatgcttgttgaatgaattaacttggctgatactgaaaagatgaactaaattcaatggatttaatggatgtaaacacaacaaaaaggaagaatttttacaaaaagaagtatcgcttagtgtattctcctcaaatgtccatggattatctgatttgaccgcagagtccctgtaatagccaaaggcttcttggagtccctgtaattgatttatattttcaggtttcctggggtcatcccattgtagggatttataaggagatgtaagacttccaacatgacagagttgaggatgtgccacacttagagacacttaggtaaccctgatacatgtgggcatgttcctatgggcagacagagtgcagtgaatttataaagaaatcatgtagcacccacatctatagtagacagaacaagcaaatatgtatgttgctcacagggcagcagtgacattggatgaaaggggtatgtacacttaaaagcttagagtatgaaagggccactcagaacttagagcccaggacaactgggtctgaaacatatagataaaattttatgagaagtgaagcaggtggattttaataaataatagccattgtctggtagccattggctgtcatagtcttctgcacaggatctgaacctcgcccgattgtggagaaattacttaactttcttattttcagtttcatcacgtctgaaatggggagaaaagctgttcttggaaaggaatataagatttagatttactttcaatgatttagaatccctaaagctaagccaaaggttaattattaggagagtcatgatgaacaagcagtggtttatatgaccctctgcaaccttcagttaaaaacaattttaactcttgtttcccagggaagaaatcacagataatgctgttttcttattttaaatctctcttctcagctcagatgtgagcagaagtcgactgcacccacccccttcaccttcttaagggagccctcctttttaatgctaactggttaaaatgtaataatagttatcatttggagtctgttaatcttgtttcatcagctggtctcttctctttgcttagcagaccataaggtgtgagggagtgtttgctgctgagaaatgggttgctgatcatcttgggctccaaataaagcatctgtgatggttttgttgtaaataagactattcaaaatgaaggctaacctaattttcctctccctctgccaatcgggtgctgggcccgccaccactgtcctccacagaacggctacacgcctttgcaccaggccgctcagcagggtcacacgcacatcatcaacgtcctgctccagcatggggccaagcccaacgccaccactgcggtaaggcagacgccactgcccctcaccacgctttcttctttttcctctcttgccctggtggcttcttgtctgagctgagtgaggtcagattcctcctctttaaataagccccctggactctggaaagccccagatttttgggcaggctttccagaagtcagtgtgacttccccagaagtgcttgccctgggagggaaagcagtcagcctgactctttggctctctctggagacgggggccctccgcttgggctgctggaacgtgctctgcttacagctggctctcagatgtgagcacaaattgaccccccctcgccttcttaagggagcacagtaagggagctgctagcttaaacaaagctcattgagttgtggagccattgaaatgtaaactaagcggtgcaattaaacgaactgggatcccgagtggcctgggttggatgcagcccgaattgcttgcctgtgttattttgctgcacagtgagcttctgcacagctgtagctaaatatgttaccgtgttcccgatggtaacatcttacctgcagcagatggcctgacttctgatgagggataagtgtacctggtacttgctaacaggttttggagacgtcatgaggcactttcttaagtgcaatacagtatttgtagaagatatttgacaaccttagggttaaagcgtcaagtgcttcttattaaaaagagcaagcagatgcaagcttgttgtgttaccatggtgacctggcctatagtctgaagaagttacaaagacagatttagacgtaatggtaaaaactagtgattttcctaagctgtgccttgttttggaaggaaatgctggctgatgcagagcagcgggtgagctcattggctcacatcgcagtcctctctcttatttctcactctctctctttcactctctcttcagaatggcaacactgccttggcgattgctaagcgtctgggctacatctccgtggtcgacaccctgaaggttgtgactgaggaggtcaccaccaccaccacagtgagtatgagtgactgactagcttcagccctgttattcttcgttttcaaactaaatacatgtacagtactttttcactcacaagatgtttggagcttttagttttgaacttctttttgttgaaagtattgtagcacatacataggcgtatgcagaagtaaatggattcacacaaggaatacagggcttcggcttcctttactcagcatctatccctataaaaatgtgtgaatatagttttataatatttaattcctttttctgtgactggcttcttattttctggcttctgtgccctttcctttagttgtgtgtgacacctaccgctggcaaagcggtaacacactccactgcaaacttaccttagccaggaggtcaggccagcctctggaaagaccctgctcctcccaacactgtgctcatgactggatcaaatggactcccagtgagagcaattcatccttactttgcatcttatttctgattattattttttaattcaaaaagagaattccttgtgctttctaggtaaattgtttctgtgttgtgaaaaagtatattttaaaatttcttattttctctgttttgaatacaactgctgactcttcatgacaaatcagtgattatcactggcctttgctagagaaactctagaagagtaaagaccatgacaatattgagtcctaatgctcctgtaccattcagtgggagcaaagtttaaaggagcctcctgagagggggctcctacctgaaagtggaagtgctattatatttgcatttattcactcactaactttctactttaagcatggattaaagaatggctctttaatttagcttcgtaaagtagaaaagtagaacagtacgacatgagaagctcttcaaagacaataaaaccacaaatgaacaaataaagaattctgaaggaggttctagtaaatgctccaaactaaaaatgcatatagagtttgaaatgcttggtgtttttgacagatgtgaggaaaaagaaaggaattttgttcttcaggctgacagtaagttcctgttgacatatattgaagtgatggaatacagttggtttaacgtgcagttttaagcagagtggcctatgatttattaatgagctgcaagacacaaactgaatttagatgggaaagaatagcactgcttgttttctgaagcagaatcttaaaaccttcagccagttcaccacaatatttttaaagatttaaggtatagctttgataaattatataggagaaaaacaggtcttgtcactgcctagcaccatacttgtaggtcactatatttaatggctttttcttattttatgatttcttataccaggaaaatcttcatattaagggcctacacatatatgccacttcatttgatatctttaaaacaaggtgtacatcacaatacgtgaagcctttagtggcaagattggccaagcacacctgttctgccattagaagtcatgttttctctcaactttttaccttttccctgctctgggaataatgtatgtttattttaccaagttatcactagatggcaagcttgtatctcttgctatcttgtacctactttgcttccattcatttcattaactgatttattccttcattatttattggatataaaatatgtgctaagttctgtgctaagtgctgaagaattatcagtggtgaaaacattactcctccccaccagcaacttcagtgtcatgagagtagagaatgagactcaggcttggtaagaaaatacattcatattttactcaacaaaactatggaacttatatgtctggtttcaaagagatctcaggtttgtagatattactcaggtgaatgacttcaaacaaagatctatatttaaaaagaagagcaaataagcattctctggtttgtctctaaatactgtaattgctgtctcagtgtccttgtcagaaatcagatacaagatcatctctctaccacatctatctctggaaaagatgggatgaaaattccttttagaaccccctctgtgagctttttttcttttctggtaactattattctctacattctgtagctgagcattgctccatcaaaagtcgctatacttagaattcaagtttctaggtgaaaagccaataaaaatagaaaacataacagcatttctcctttcagttaggacactaagaaatcattgtccacatgagctaaacaagtatctctgttacctaaatggatagttttaatggttacatgtttcgatgctggtctctcttcactgtctgctgctctttgaactggtttctcttataattgtgagcttaattgttttgtgaaatggaattttggggtaaggattggaagaatagacttattctcatctattctgggagtcttcttacaataaacttcctctctttggaaagagattttcaatcattcttttcccacataatattttttccacataatgtattgttaatgatattaaaaacagtaatatttaagtttaaaaatatgtaaggcattgagggaagatctaagcttcagatttaggttgtcgggttttaaagcccatgttcttaacctttctgatataactgactttggttttgctgaaaatagcttaataggaattttgtgaagaaactgttttcacctaattttcaacaaaaagaaaaaccacttaaatagtgctctttattgatttttgtgggagagtgatattcaatatcattttctaaaatctacagtcacaaaaataatttgaaactactgatgatagcacaatagacaacttaatagttaagtaaaattaataaaagttaatgttattaccgctcaaatgcaacagttgcattacacctgcacaactgacatactaatttaacatgaattggatttgtatgatgtgccatatgagcaaccatgtagtccttttgatcaaagaaagtttcctttcctattctttcttttgagttctttaccccaaagtatgaataaagtcgttgtgtagagaccagaataaggcagtagtttgtaaaggaaaaaccacttctgtagaaacttctgagacattttggaatcgtagtttgtttccttaacctttgcttttctaactttactttgtgagatacagcagggaatatgagacattttagcattctcctgggattacaatcactacatgtttgccagaatggatatcagaatggtagagacacatttctggtgacagaagccaacaagcccaatccactaatgcagcttggaagaactgtgacatatgactcatccttccgctaattgatcaaccatcatcaattatttctattatttgtataatcttaaagtgattgtgttttatgttgcatataattggtatgcagaccataaattactgaataaattagtaaaataaaaatattatcttatattattacttgaacattagggaatagttcagtaaactcagaaaatgtgaatattctaagtcctaaatcttacctgatgccataagtcagttaacatgaaaatcaggggaggaggggatagaggagttgtctaatgggtacaaaaatacagtcagatagaaggagtaagatctagtgttaggcagcacagcaggctaactatagttaactaaaatgtatatttcaacataactagagaagtggatttggaatgtccccaaatccactggggaggcattttggcctcccaaaatgataggattacaggcctgagcccccgctgtgtattttcttaaaaagacatacttagtgcagaatctttttaaacttttgacatgttttttcaacctgttataattgtctcaattacatctaattgggtattactttcagtgactcacctttgttaggactttaaaaagaaatgataaatgtttgaggtgatggatatcccaattaccctgatttgatcattatacttatgtttatatcaaaatatcacttgtaccccgtaagtatgtacaactgtgtatccacaacaatttaaaaattttaaaaataggagccataaaaatggcaatacaataaatacttgtaaagtcatttgacaccttttgaggtagagccaagatcttttctttaaatataggtccatcgattagaaattaaattgccattcttgcacaaacaatatcaatacctattatattatgtatatatatgctataatatgtatatttatatgatatttgtatgttctgtgtactttccttttctttctttttttttgagacaggatctcacgctgttgcccaggctgaagtgtagtggtactatcacggttcactgcagctcaggtgatcctcccatcttagcttccagagtaacagggactactcgggagtagtaggtgggcaggtgccaccactcctggctaatttttgtattgttttgtagagacggggttttgccacgttgtccaggctcgtctcaaacgatccacctgccttggcctcccaaaatgctaggattacagtcctgagcccctgctgtgtattttcttaaaaagacatacttagtgcagaatctttttagacttttgacatgttttttcaacctgttataattgtctcaattacatctaattgggtattactttcagtgactcacctttgttaggacttcaaaaaacatctaccctagtttttctagaaaaaaaacagtatttacataatatttaatttagttattaaagttatattaatatgtatgattggtataagtatgtttagaaacaaaaacaagtttagcttgaactccactgatggaagctatggatgagggccttaaaaggtggcatcataaccaagatcactaagtatgctgtggtggcttagggattatgtgatataaatgcaattggtgaccaggaggattggctgagtgagggttggctaagtgaagatcagttaaacacacagtttcttttgcatagaacaaatcagatattgactactatttgtaaagcagaatgttaagaactcctactttattttctacatttttcatatcgtgattaacaatataaattcattattaaatctctcttccatctattatataccatttcttttgccatattatccgatttaattatatcccattaaacttgtacttagtgtcctactcattttaacttttaaagtagtttctaatcttgaccatagtatcttggattctgtagcagaaagagatgtccatgatcatttcactatagccttgttctctatgtacgattcagaggtagttgcataaaaccatgtttatgtttaaataatcaagttttcaaaggacattttgtttaaaaggaaaatatgtattcatttcttgttacattatacatatgtaggactacttattttccatccattcaacaaatatttaatgatggccttctaaaggtcaaataccttctcatgtataaatgatattatatttaccacattgcatatagaggccatttttaatatctatacagaaaaatatccatgaccaatatgatcacagtgtattactttttctgttgccacatatatttgctgataattctgatagcattcagtgaccaaactgaagtaaattattgtttccactcttacaagtacaaagaaaatatagtcccattatcagcacctgaaaatagaaactgagactatcaggcaatgaaacttaatcatttaaaaagtatctccagtaattattttcaaacagagaatcatctccttattgaaatgtttactacgaaggacaaatactctaaaacatttctgcaaaaattaactttctaatacagtctaatatagtagacatcctttcacatttttaaatattcccaaaaagttgaataaaggtcagccgcggtagctcacatctgtaataccagcactttgggaggccgaggtaggtggatcacctgacgtcaagtgttcgagaccagccaggccaacatggtgaagccccatctctactacaaatacacaaatgagccaggcgtgctggtgcacacctgtaatcccagctatttgggaggctgaggcaggagaatggcttgaacctggaaggcggaggttgcagtgagctgagatcgtgccattgcactccagcctgggcaacaagagtgaaacgacatctcaaaaaaaaaaaaaaaaaagttgaataagatttcatagtagggtagtctctatgttatattttaaatgcaaatcattttcctgcaatttatatactttccctaatacaggaaaatgaatctcaaattgagctgtgcaataaacccacctaaggaacctttaaaaaataccctggtccccattatagctgggcccgatccctatggattttgatttaattggtctatgatgggacccaagcaacaatattttttaaatgtttctaataattgtaatatgtagctatagttgaataccactaatacagaatatgggctataatttattggtgttaaatttctaaattaaaatttataatattaaaataataatcaaattgtatattataatagtctttttgagtttgttcattcaacaaatatttatcaaccactactattctccagatttttggatggatacttttgtttttcctgcagcatttagtttgctttcagtgaataagactctgaataaaactatttaaatatcactagaaatatgcaggcaagctgaatttacaacccttgcctccaactgtgccttcatgtgagtagcaggagactttctttactttctctgtttcttcctgtcttttaactaaaattccacccaaagacaatccatttcatcatgatatggattttaaatttattttttgcataatttagtattaacaagtttttgatatatatttgaaaagctcctgctatgtttcaggtgctgtggaaacaatcttcctcttaaatgactcacactctcatgtgggcagataagcagagagggcacacacagtgcgtagtgtatgacacagcacacacgatgctctaggagtacatagcagcagataaacacagttaaacaaagacattcactggggaggatcagggaatgtttctccaagaaagtcacatctaacctgagccaagagaagaggggaaagaagatttctggtaaatgagagaatatgtggaaaaactcagaggcatgagagaacatgacctgtcaaaataaaggcagctcaacacgatcgtagcatggaatgagagatgaggccttgctacctctcgctctttactgaatcacagggctcttctgagccagtttaatcagttttctgaagaaaacaaagagccaccaaaaagctcatgcagtatcacattatgatcacacagatcttatatatgtatatagtcagagttgctcagtggaatttgattaaccagttgaatttctttgtaaatatatttgaagttatctactgcttttggaaagaaaataattgatgataggttcattatagcctttcaaacaattatctaacatctaggtcaaagcctaaaaaactagacaacctattttttgtactttggtggttttagttgaagatgttactcttatgtcaagggattcatttttttttaaagtttccatgacagtgtcaattgatgcccttaatgtattttcactacagaaactgaaggtttgaatttgacactcaatagtctttaggtgatgttcaaaataatgagatttgaatttttatgtttttggggtacacatatcttttatttatttattttagttggcaaataaaaattgtacatatttatggtatacaacatgatgttttgatacacacacacacacacacacacacacacacacacattgtgaaatggctaaatcaagcttattaacatatctattacctccacatacatatccttttttttgtgatgagcgcacttaaaatctactctcagcaattttcaagtatatactacattgttattaactgtagtctccatgttttacaataaatctcttgaatttatttctcctgtccaactaaaattttgtatcttttaaccaacatctcccaaatgctcctcccccttccttctccaacacctggtcaccaccaggtgtctattctgtgcttctgtgagttttttagattccacatataagtgagattatgcagtatttgtctctatgtctggcttatttctattattctgaaaaatcactggtatgtcttgtgtctaaaatagtgccaagcatgcagtagacattcagaattttccttgagtgcaagaatgattataaaaagtccagaggctcttcacttttaagatgcatttaatactgagttacaataatcataataaattatggtagctaatatttatggagtgccaacatatgccaagcactatttttagagctcttgcatatattacatcatttaatcttcctaaccattttatgaagtacttttctatcctttacttatggttgaggaaattgaggcacatgtaggttaggggacttgctagggccttataggtaataagtgatgaaattagaattttaacccaggcagctagactcagatccttgtctcttaaccttacactgtacatgaggaatgaaaggcagtggattgacaaccttggagagctattgcataaggcaaataagcaacaaaccagaactgtagcccagtgaaatattaaagagatgatttgatcctctgatcccaaaagagatgtgtcatattttctgcccaaatagtttatatctttcacattatttacagcttcttttctaatggctttgcttttaatacattgcatatgttcattgtttctttttaaagcttttctggaaacgtcacttagttcattttagggaagctttgaaaacatcaatctgctttctcaatacaactaattattattaataataccattgctaaagaatttatttttcaaatgagaactcaaaataatgaactgtctcttgtacaacttctctggcataaatgatcatttatcttcaaaaagaacaaatgagttttcatgaaagcaaatttccaaaatatacacgcgggaaagatcccgtagtcatggctcgatggcttgctgctgctgttgagtgtggcctcctatgtgatgcttttcatcttttgtttacttttggtttcaacttgaacattaatgatttttgtttttccagactattacagaaaaacacaaactaaatgtacctgagacgatgactgaggttcttgatgtttctgatgaagagggtaagacttctattcaatcttctatgacacctgtcatgttcttacacaagggcaaattaccctttttttcagagaccaagctggttatgtggatgacagaatcttaacatttaaagtcactttttcacctttgtttcaatacatttacttttgccatggcagcgggggccgggggcagttctgattagtatatttgtttctggtattatttctttttcctagcattaaaattaatggctattaaataatatgactggaaaaggggaaaaactggaaactggccatgtgttaaaatagctatatgataacacaattgttattaaaatatgtttgaattatgttaaaaaatctttttttattcaaatgactttaagtaaagactttaaagtatactccatcaatgagtgttcttcaattgagaaatctctgtattctggttggttcatatgtacagaatatattttaagcccagaggagaagagccttatagaaggtttaaaaatagtacagcaggaagtagtataaattccacagaagaatgtattatttaagtcagaaaatatcccccctataattttagagttgatgaaaaatgatctcaggcaatggcttcctaagtcctgggaagcctgctttccaaaaaggagcagtggggactgcctggagtgggtgtgtgacattgggctagagctggagatgggccagctggagggtgtccggctccctatctctacttcaactagagtagctgacttttcttcattttgtattttgaacttccatgtaataatccacttggataaaaaaatgtgctactaaaaaatcatgaaagcagcatataaaatttgcaagcatttctttatgagaagatagaaaaaagaaagaaaaaaaatcacgcaaccaagtttcaatagttcagctattggtccaatgaacatgattgaaaaattaccaccatatatgtacatgaaaatgtatgtttgaaaaattattgctattaagaatggcactaggtttaatactcattgcttttatacagagaaatattaaagatgtttctttaggttctttaagataaaatcataagataaaactttacattgagatgtccttatttagaaccaacttgttgaatcacctattggtagtatgtattgagttttctcagcttttataaaaatttatgacaagaatgaacaaatgttggatcaatgtagtattttgagtaaattcaaaggtattcccaaggccagcagttccaaatatttagtataattttgtgttctatcttaatacttgccaactagttctcagcattcctatatgcatatcatattttgttttgtgggatcatctttattatctttacttgtatgttgaacagctcttaaacagtttggtgaccactttattgatggggaggcacttagtgattcaggtacccttagaggatatttttggagtgaaagcttttctttgcttttgatttttcttaactggatagaacaacttgtttaaatctgtgtgcctaatactaatctgtttcttttgaaatagcatgtgtaatatgagtggaattgtatatgtgtgcatttgagtgtgtggattttattaacttagaagcctaaagtcatgaattgtttgtactgttaatgattttgcaactattattgagaactgctaacataattatataatctaatgaacattatataaatatttttccacaactattatcttttcttagaatataaatttagagaaaagtaattcttttgttagttgacattgagctagtgtgaacatgacaataactaagttagaccacttgaaattaatgcagtttatatcactcccttggttgatgatatattttaggtgtgattaaaaatatattaatagttatgtgatttttaatatagctaagaatagaaataaagtaacatttaaaaattatttagggtgaattttgcatataaggaaaaatgagtaatgtaagatattttatctagtaagaggtttccaaagtacacgtggtaccactttaagcaactctattacatgaaaatttaaatttataaatcagataaattgaatagtgattatttaatttaaaaatagccctttatttacaaaataattgctggagaattccattagttaatacatttaaagtatttaatattgagttataaacgaaatttataaaaaatagcctcggccgggcgcggtggctcacgcctgtaatcccagcactttgggaggccgaggcgggcggatcacgaggtcaggagatcgagaccatcccggctaaaacggtgaaaccccgtctctactaaaaatacaaaaaattagccgggcgtagtggcgggcgcctgtagtcccagctacttgggaggctgaggcaggagaatggcgtgaacccgggaggcggagcttgcagtgagccgagatcccgccactgcactccagcctgggcgacagagcgagactccgtctcaaaaaaaaaaaaaaaaaaaatagcctctcagatctgcctattgcattaaatgagataagttataacattctgtactttcattattaaaaatgttatatattaaatattactggtgataagaactcttggtttgtgaagaatattggtgaatgaccaagattatcttttgtggcaagagaagtctatttttagaaatagccaaaacttaatgatatttctttccccgaggaaaattcaagttgaataattttcatgtaaaggatctatttgagtattgataagtaactttttcatggaaaaaattagtgtgaaggaaattagctggttgacattgccaatgccaacactttaatgttttgtgaggttaatatgtttttatgaaacctgctatcatccacgtggacacaatgcagccacatgtatttgaaaattattagctaatccctgttttctctacagtctattgttttattagtagtaatagtgtattgacacccaaaaagagtattcaaactcttgtcattaagaatggcactatgtttaatactaatagcttttaaggagaaatattaaggatgtttctttaggttcttcaagataaaatcataaggtaagactttacattgagatgtccttacattgagatatcctatcaggctaatttgctgtatacacattaaagtaatccataatatccactcatgaatccaattaacaaataatgaatatgatgttattgtgtttcggaaagctctataactgatgccacagtggtcaaaggtgagcatgaggcacacctttaggaagcctatatggagaaataatgtatatattaaaagaagtataatgtaaggcactatgttgtcagtttttcatatccacttggggagatcaggagctagatatacctaacacagtctcatgaacgtgctaagagatgagagattaataacagggcacatagattttagggattagataaggaacagtatgggaaagtcttgagataggaaagtacaagagagagacacagagtggcagaatcctccagtcatttggtctgctgatgcataaaaacataccaggctcagttgtggactgtttgaattcttaactgaaagggaaacacgataccttaaagatttcaattaatgatgaaaacatttaaaactgtttttacaaagatttaaccagcagtggtacatagaaaaagtttattgagaagaacctggaaggaagcagaaatctaagaaaagagaaagcatttactaaatctctataatgctaggtacatgtctcatttaatccttataccatccctgtgacacaggctgtggatatcattccacatatatatatatattttcagttaaggaaaggcttatttttggagaatgaggcctagagacattaagtagtttgttcaatagcacgcagctagtaagtggtgggtgtggaatcaaaacctagtatgaaaactattgtaatagcacagccatgatataaataacatccttatggaggaatatggcagcgaaatgcaaggaaaagacagaaatgggaattcagtctaacagaattatagcatccagatttaaccaaagatgtgaaggtaatcgtctaagtctttgtaggatcgtgagttgatccctgtcttcgctgacttggcttcccagccataaatgatgaggtggggctcagagattttggcatctgtataaccaaaatgcccataggaatgtgactcatgtatgccttattctcatggattcttgagtgggtggcttgtccatatatctctgctagtactctggaatgatgtatactagtaatcaagagaactccagactggctgaatgttgggatgaaatatagaggcgcctcctcctttgaaacactcacttctgttgtgaacacttaacacttagtggggctcttcatctcaggttttagccctttttccatgtctcagcaggaataatgcttgcttgagagggagtgggttccgtaacgtttcagagaatctccttgtcagcatcatgaggggttgtcaggaaggggagccattccacctttttttttttttttttttttgtgatggagtctcactctgtcgcccaggctggagtgcagtggtgtgatcttagctcactgcaacctccatctcccgggttctcctgcctttagctcccagagtagctgtgactacaggtgtatgccaccatgctaatttttgtatttttagtagagactggttttcaccattttggccaggctgctctcgaactcctgacctcagggaattcaccttacttggcctgccaaagtgctgggattacaggcgtgagtcaccacgcccggccgccgttccactttaagttattcccatgctattgtcacccgtgtcctacaggggttaaatataccactcactatcactgaggaatcttgtgttttccgggtatcaaaacatcaattgtacataaaaagcctgcagtacactgatgctttccagttagtagaaaacagttttcacgaaattgcttggaaacattggacaataaaacaacaagaaaaagccaagtcataaacctgggaatcatcattctattaagtgagtaaataggtaacaatcggaaggaagttattccaagtataggaaataataaagaaattcattttaggtttgttctataatgtaaaaactaaaggttgcttttagtttggttttgttttcacattgaataagtaagttgaaaaaaagaaagtgtataatgattctcttaaagctgtctgagttgtacaaaattctttccaagtctaatggcactctattcaaacaaataagagctaaagcttttaatctgaatattattttaaatcatcttttctccccccttggcttgggcaaggaagtagtcgtgctatttgctcatgtagggaattttcaaagagaagcacattgacaaggggagaggtaaagaagatgagttctgctgtggacatgctaaatctgagatgcttatagaaaatttaggtggagaagtccagaaggcaattggaatatagatgcaaaattcatgagagaggtctgggaccaatacagatctgtgtattgttagtggacctctaagtccatgtgataatatgtgaaataagaagaaaaggcagatggaaaatatcaacatttaagagaagtagagacagggaagaaagactcaaaaatatagggggaagaccaggagagatttgtgtcagagaaattaaggagaatagttttacaaagaagaaatcacttctcagccactgattaattgctgaaattagcaagcatctgcttgataagtttgattgttaacaaacaggagtcagagtgtgaaataaagaaggtctaagagtttgggaaagaagctaccatatttcagagatggcagaaatatggatgttttatccatggaaggggaaagacctccatagaatctgtaacagaggagagaaggttgaagatgaagggcctagcagacaatgtatctaggaagttgggaggggatgaggctttggaggcagggatgggccagctttacactagcagaaatcttctcacccaccaagggaagcaagaatatgagtgttatttcaggggctcattaaatacatttaaagctttgatttgtatgcagaattttccagttatagaccaacctgggtaatttttttcaaagtgatttttcacattctgttaatttctacttgctttcactttccatctttcactgctggtatgtattactgaatagcatgatttatatacatctaactgtcttcgagagaaattttatatagcactgacaagattagtccccagagaggtggctttccagctaatgccaacactgggataggatttagacactgctttcagcatttagggactttgcttctttgggtcatttctctctgagacataatcaagacattgactatatacctagggccaccccaggtgtatatgaaaatgctaaaaattcactttaagtagcactgaacctagcagcagccttaggcagatagcatcataacaaaaccatcaaaatgcacaaaataagggagaatgtaaaggacattcacttaggaactcagcgtaatcagaggtggtttttttgtttgtttgtttgcttgtttgttttttgtttttttgagacagggtcttactctgttgcccaggctgtagtgcagtggtgcgatcatggctcactgtagcctcgacttcctgggctcaagcgattctcccacttcagcctcccaagtagctgggaatacaggtgcatgacaccatgacctgctaatttgaaaaaaatttttagtagagatgaggtctaggtgttactcaggctggtttcaaacttctgagctcaagcaatcctcctgcctcggcctcccaaagtgctgggattacaggtgtgaaccactgtacctggccaatcagaagttttaaatttttgtcttgtcaccagagtcataaaattttgatatatttgattaaaaatatattcttcaaatgtctttctattttctaataagattctattcacacgagagaggaaggctgggttcctgtggttgatttgcatgttctacctgatcaaatgctgtgtcttgctccttcagatgtagagtcattccagccagactcttcttttatctttacctttctcaccttttctttcttcacccttataaaccttcctcaccctaccaaggtgtaacaagagggaaagataaatgggagaaataagaaaatttgaaatgtaggacccattttattaaggagttttgtggatttttaaggaccaagaagttaaagcttattttgagttgtatttattccctgtgaccatcttggctgctgagagacagcggtgagaactggcaaattaggagaagcaagatgaaatgcaaaagcaaacagactctgaggagggacaggatgctcgaacctaagtagtattcagaatttggtgctagaattttggggagtaggggtggggtagaagactgggggaaagaaagagtatataagcagacttttttttttttagatgagtctcactctgtcacccaggctggagtgcagtggtgcaatctcggctcactgcaaccttcatctcctgggttcaagcaattctcctgcctcagcctcccaagtagctgggactacaggcatgtgccaccacgcccagctaatttttgtatttttagtagagacagggtttcactatattggtcaggctggtcttgaactcctgacctcaggtgatccacctgcctcagcctcccaaagggttgggattacaggcatgagccactgcagccagccaacttttagtttttaaataatctttttggctttttgcaagggatccataatatgcagcttgcactgtgcttgtattatgtgacagattctgtattaaaccatccccttcaccttttcatgaataagaatagatgtagtctcctgaaatgttaataaaactcatatttttttctgaaagtaatgtaggcttaatcctaaagcagactatgcctgtgttttgataaatctataattagaattcatcttagaagttttttctcctagaagtaaacaacaagggatatccaaacttaatattaaaagaattaaaattcaagtgattacttcttcttggtaagtactaagaaaatgaatcaaatgttgtttctctaagttttagcactgtatagttgtttgctggtgttctgtgttctagtgtgcagtgcagtttcatcaaggtcaaggtaatgatgttgatgcatttcacaatcatgaccatatgttgtagttgatattacattcaagaaataatcctgcttcttcctctgattgtttcaaggtgatgacacaatgactggtgatgggggagaataccttaggcctgaggacctaaaagaactgggtgatgactcactacccagcagtcagttcctggatggtatgaattacctgcgatacagcttggagggaggacgatctgacaggtatctcataaaacttataattgatgtcagccagaagtatgtgcaacatattttttatgatgatgataaaaatgtagatgcaattattgagcatttaataggtaccttattaatctcagcagttagcatgttatgtttttccattgtctaacaactttaagatatgcccattttaaagaacagaaaactgaggcctagaaagatcaaataacttggtaaaatcaaacaactagtaagaagcaaaaccatcataaataagagttctcatcatttaaatgtggcgtttttcatcactggccactttttcctcaaattaaaaggacaattttgccttatagacattcttactgagcggcatcacagacactttggatactcttctgcccccacttttttgttagtaacataatttctgtgaataaagtatgttgtgaggctgaattaaaaagaaatacattcagaacaaaactgcctggaactgactttttcatgaaaaagaatccgaacagaatcccacgagagcctggatacaagaaacaatcggagcaaaatctgagggagcccagtgttaataggcaaatctgggaggtttatataatattctgagatatatgatcagtgctactttttgttattattaactagtacaactggcacttgttatttttttatgcaagttaggtaatgacattctgtggttcctcattgaaattatgactgataagttgggccatgaatatggatgtcatagctgggtgcagtggctgggtgctgagacctgtagtctcagctacttgggaggctgagttggaggatcccttgagccccagaattcaagtccaggctgggcaacatagcaagacactgtctcttgagacagaaaaaaaaaaaaagaaaagaaaagaaagtttgtccacgtagtgtaatgtgttctgctaatcaataatctcaggtttatagttttaaagttggcactattgtaagctattttatgaatatccagcatagagtctaagaaataaataccttaaagtctaagtgaataattagcaaaaacaaacttttcttgggctttttccttgagcaccaatgcccccttccactatctttttttttttctttagcaagataggcttgttaacttcatagtctaatgggatgggagagggcataagctagtggtacacatagagtgccactgaagccctgaggctctagcttcctggagcagatgaaaccaaactgagaccaaataatgagtaacaatggtgaggaaaagtggggagggcatttgaagccttaacaaggtcttgagcaaaggctcgcagggtgtatgagaaaaaagggaatgcagtgttgctggagtgtaagtgtggaggacgggaattatatttgcatagcagggggatccttctgccagtgagaaagaggatgaattttaaaggagagtttcaaagggctaaacctggagattgcagccactctgagaagcaattgttcgtgtattaactgcaggtgtcatgagaggactagcactctaaccttggtgatagtcatggagagaatttcagaaataaaaaatttgagagttttttgagacatgtgtaggaggcaaaactagtcagatttcatgatgaatttcatgatttaggtgaggaaggggaaggagattaaattgagtccttggcttcaataacttagataaagggtgctcccagaaggaggagcccctctggagttccataagctgtcttgatacattggtagatttggaccttatactctgagattcttaaaagatttcaaatttgaataaagtgtaatgttcatggcattgcacaaattgatgataatctatgaacagtcttattactgtcaaccataaagcttctattttttgcatggtctcccttattaagaataagtacttgatttgatctgtttttcttctttcaaagtacttaggttgaggaagaatttagaataatactttctataaaacaggatggatggcttgaatgctcctgcttaaatccaatacttttcagcacataaggtcaggggacatgaaacaaacaagacatactgtgttctccaggtctccacttgcatttctagatcactagatgtattcaccatttccaaaatagagtgacagacagcatctcattttcatggtcttcttttatttttaattttgcttaggcaattcaatataagttaccttttctcagtgaccattttttcctttgcattatttctttatctgaattgctttcactagcaccatgcccaggtaggtattaacagagcatggaaacaagcccttcctagatttatccacatttccctgctcactgctaaacctgcgtgtgtgtgttgccggggcggggggtgagggggagcggtgggggagtgggagggggtgcttatattctagaattatggatttattctaaaataaatatttttatgtattgaactgaataactagctgagctagaagaggtgaatatattattaaaatgtaaatctgtgacatgacccaggtattgctttgtttcaacaatcactgctgcacctgtggttgataacacattagcatggctttccccaaacaaccccaattagcctatgtgtagttggagaagatagaaaaaatattctgatgcctaaaatatgcatagatatggaagaatacaaatacatacaatttaatgtacattaaatacaaatacaaccaagttatgattagttggattttgcatctgttttattttattgtagcttacaaattaaaaatgctttccaaattcaatgtaaaatactaaataataatgaaccacagaagcttcttcatatcttaaagcaaatttattgaaaattgtggatttctactcgttaagtttgccactccattaattgaatgtttaataaatattacagtttaccaagatagtaattattatacttttcaataaaattacactttcataccacctattatgtgtccataaagcagttgtaccgtagtaaaataaaaaatataaactaagaccataacaaaacccctagtacatcccctagatgaacagcaagtaaaactttacacttctatggctatgttattatacatttattaactgaatagcagaaccattgacttcatgaaaaattggcaactgtattggaaaatatttaaacttgtttttaatgtcttaaatcagagtgaacaatttctgatccaagggcttaaattattccagacctttgtcatgctggttatattattttagtgagaataattctttagttattattattttagagggaatattcttttagagcgaataacttctctggtgttggaatagtccatctttatttcatttaagtagattatacgacatcatttttaaaaaagcagttagaaatgatacacattgattaaacaaccaattagtatttcagaaggcagtaagtaagtagaggaggctagaatacaacccatagaaaggtagagacactcctatatatggttttgacttattcattgttgctccctctctctgtccaacttttctcactctctgtgtacatatcctaatatctttctctctctactctaatcaattttttgtgattatatatcactttgtctccttctttcttttcttatccctctgtatttctttcctgttggggttttaggaaagacaaaaaacaccaacacctctctattcctctcagtacaaaaccaattgagagatagactcaggtatcaactaaatggatatcaaaatttcacttgtatgactgatataccgattgcaaagtgcgactttactttcatagcccaatgggctctttaataccacattcctgaaatagacagacttgtctacttagccatagtcactccttgagagtggcaattgagacctgattgattctttcaaagtttagacctttgcaatctggcagccacgtcacaaggttttatttgaggtaccattatttaccattcagtttgttctcattcaagctaaattttcattttccctttgagaccggtgtttctgctattccagaagacggttgagcccatagaacagctgtattagaaacagaagaggttggctcctctactattttcccttccttagccaaattcaaaacaaaataaaggtgaatagaatttaagagttgctgatctagcccgggcatagtggctcacgcctgtaatcccagcactttgggaggccaaggtgggcggatcacgaggtcaggagatcgagaccatcctggctaacacggtgaaaccctgtctctactaaaaatacaaaaaaattagccaggcgtggtggcaggcgcctgtagtcccagctactcgggaggctgaggcaggagaatggtgaacctgggaggcggagcttgcactgagccacgatcgcgccactgcactccagcctgggtgacagagcgagactccgtctcaaaaaaaaaaaaaaaaaaaaaaaaagaattgctgatctcgtgccacctggtacaaaacacatccaagtggatcttagctatctttgtgatttacagcaggaaaacaaattatccattccaccagctgagacaagcttttgctgagattaacccttttcccaataatctaatcccctatcaaaagctaaatgtaaaaccatctgtaatataagtagcctccaattgctggagctaaaactcttgttgatgaaattactaaggctctgtcaagagcctcaatcttctccaagagcctacataacataaaatagttaattctcaggttatatttagattttgttttattgtaaacacagatttatgtatgtgttaacgcaaggatcagacaatcaactctttttattcatgtcatttaccctttaagactttttttggaatatacctacatgtaaaataagaaggagaaggtcctggattactatgaattacctacaaagtgatgatttcctcaaagacaattgatgcgggctatgttgacacctcatagatatgatagtacatggcttacaaaattaaatatacttgcaaaatgaagatagtttctactaataaatatgctaatttaacatttagtccataattctacagtgcttcactggccaaacacctactagctaaaagtaaatgaaagtttgcttctataaatattgtgaaagcttgcgtatctcctttttttcccttatgggctttgggctaatattttgaacacagatctttaatacttgagctacagtgtataaaatatagcttatttaagataccaatctgtcatttgattttacaaattgatttaaaaggaatgagattgcatctatgcaaatgtcaagttttacctattacatatgagtgtgtaatttagaactttgaagttcagatttttcaaaaatgtaatgcatggtttatcaaggcctaaatcccattttgaagccaaacctcatttttggtcagtggccattggcaatttgtctttgtgctggcaggtgtgtctgtgttctgggctggagcttagatacagtttcttgtgctcatgcatctcatcaccacggcaaccaacactctggtgcttcagtcaccacacacaggacatgcaaaggggacagtgctctcgtttgaaataatagcattgttggagtcactagagacaaacaagaggaactccacttccgcaggaagcatgcatctggccacagttcatttcactctgtaccttccaggggaatgcaccaacattcagtcattcacagtttagagaggaggagaaagaggcatagagagagaatggaaaataataagcgaaaatgaaactgggctttcattttgttcttctctctgagggccatctactttcctccttatatttttcttagttgcagagagattaacatttaacacagatttaagcaatctatcctggaattatttcctgagtgaatttctggtactggcagtaataaactacagttgctggtttcaaacatttctgggaagaaaatgaatcagattaggagtatcaaattttaacttctggattcccttgtgctcttgccattgagcggtaggaacctgtcaaaggatgtgttagttcagctgttggacaaaaaggtaggacaacagagacttgtgtccccctggaagttgtgctgttagctaatagcacgcttttttcactctcctgctcggctcatcattttgtcatcccaaccctgctactgctgttggtatatgccatggcctcctgccaacctaccagccttcgatccttcagttccgacaggtctcacactctgagccatgcctcctacctgagggacagtgccgtgatggatgactcagttgtgattcccagtcaccaggtatgtgacattttgccttcatgtctttgctttctggagagctttgtaacattattggatgctagaaatgtcctgagaaagtttttaatccccccaaaatcattcccaattcagttgagaagctaggataagagatttgagggttttcctaaaacatgaaaaatgttcactagattttttcaatgagcagtgtttttctgaaaaagcatactgcttatttcttcagctatactgaattcttctgtggagattatatatgaacattatatttttaaaataaaatctccattaaaggaaaaagtgaagtaggatgcatttaaggtataagatgaatggtacaggttaagttatatctttcaatatttaaaattgttagctatgagaaaggcttaaaatttattctggaatattttaattttagttatgattttatcacttttggtggattgggtatagggaaatagatggatacctactgtcttcaaagacaattacacgaatgtaatcttatataatctatttaaataatgcagtttaaaagagaatgcattttaaaagattcattgtaaatacattggttttatattttaagtgtaagtttttctaggttataccactttccagtgatgacactttttatattttgttatattttactttaattgaagcaaagtgtgtttattcaatccagtgttctttgtgtttaggtgtcaactctagccaaggaggcagaaaggaattcttatcgcctaagctggggcactgagaacttagacaacgtggctctttcttctagtcctattcattcagggtgagtaaatcaatattatgtatcctgatcaagaggtaaaaagagatgggagtgaaaacaacagctttgtccagtagctttagctggtggctagctttacagtggaggtgccctttgtttaaacttgtaaataacattgctttatccaacatggactctatatctacaacaacaaaccagcaaaaaagattgaattcagcattaaaaaaactgactattgttttaaaacaactagtagaattgcgtcaaacagcttgctacctaactggaatatactagtggccttcctactattcacgtactgtctttaagacatcctaaaaagaggggctgaatcatgtgatttctagaaagtttctatttattaggattagctgattggttcaatgaaataaatgcctttctcagatgctaatgcatttcaaataatgttacagaagcttgaatcacacaaatatatagaggagtttatatattgtttgaagtagggatataaacaaaaagggaatttgaacgcaatcagtcaggttctcagttatctttttaaagtcattcagagagtatacacaccactgttgaagcaatgctgcctgtttttattaactcattaaaaaataggagtttgagtcatactttcaaacatacttaaagttgttcttaaggtgttcagttatgtggaatataaattctttaaggagttttaaattgtaacactcttccaatttcttccttacatattagtagtttgcaataatatagtaatatcataattatatataaaatttctattttttatttaattatttttaaagccctatttatatgctatatatcaaaatgcaatattttgattttaattattatccccaaatccttatccataaatcccagaactatttggaaaagtagatcctttcttatttttattattctaaaatattctttattcaggaaagagttccaacatattttagttaaaaattttagacttcttcaactaatcttatactaagtaaaggttcatacaataacataagttatatagttattgaaaacaatcctaatacttttttccttgttaaataagtagaggctagttcctaatgcgacagttattcatgagaataaaaaacaaattacacttcattcaaatttacttgcttttttaaaaaaagaaagctatagattactaaaaagatacaacattgcattctgctaatgaacttcttcacagtggtaagaaggaaaaagacctggatgtagagtattgtaggatcatagataagaatctagaaatcataatgaggtgtttaaagttcatatgcagcctacaaagtgatgagatggttttaggtaaaatgtaattgactaataataactgaatttacacaagaatctgtgcatgccaatacttcagtttgcaaaataaatcatttatattttgaaaaaggaacttttaaaagaagttctttcattactgaagggcagtaaagtagtctaagtacctcaattacaccccaattatgtacaactagatacacctataagtaattatggtgcactacttatgatgaaccaacagcatccagtagttaaagatgaattatgtgttaagataaagatctttaaattcatagtctttaataaaacagttttcctatgaatctcaagcatttaatactgactctggataattctcaacttttgctgtgcattagaatcacctaggagctttaaaaaatactagtgctggccaggcgcagtggctcacgcctataatcccagcactctgggaggacgaggtggacggatcatgaggtcaggggtttgagacaagcctgaacaacatggtgaaacctcatctctactaaaaatacaaaaattagccgggcgtggtggtggtgcacacctgtaatcccagctactcaggagggtgaggcagaagaatcatttgaacccgggaggtggtggttacagcgagcctagactgcaccactgctctccagcctgggtgacagagtgagactccatctccaaaaaaaacaaaaacaaaaacaaaaaaaactagtgcccaggcctcaacccagaccaattatttggaggcctggcattgatactgtctacaagcgccaatagtacagttgttttatatataaactgttaggaaaaactttgcttaataaggctttggttattagagagacctggttaattaaggtatacctagttctctcaaatgttctttatttcttccattcacttatgtattcattcttcacacatttgtgtaattctataaagtacctgacattgtgccaggtactaagaaaaaagctaagtaacatctagcctctgcctttagaaacacactctatgttgttatttaaagttagaagacacttaatctgtaaagagagagaaacatcgtggttaatagtgtgcttgggagtcagacctgtcagaattaaatcctgacactgacactcgtatgtgacatcaggcacagttatataaaaatctctgagtttcagtttccatatctataagatgagtgttatattattgatcccataggggagctttaatagctaattactttttaaataattagcactttgcctggaaataataagtgctcaatagattatagctattagtatttgtacaatccccatatacacatgttctagatctttcacaaattgcaaatccattaaggaaaatgtattatgactcctctaaatggcagcgtcaatgtggttcaattcacaatagtaacgtttgacttactgttatttttattcaggcaaattattctctattagcgtctccagtgtttcaacaaacacaatgcatttgatgactctaacagaatgagttattactattgaaaactcaatgattctcagtttcctggtatttgaaagctaccatgatattaatgtatatgagtaacactcatcataccatgtcatgtagcaagagttttttgtaattttattcattatacaccaggttcctaaatagtagcttttatttattttttttgaagaacttagtttttctttaattaattgggtggattcttaagccacttcaagttctacccaaaatgtaaggaaaaaaaaaggagacgaagtcttactctgtcacccaggctggagtgtggtggcacaatctcagctcactgcaacctccacctcccgggttcaagtgattctcctgcctcagcctcctgagtagctggtactacaggtgtgcaccaccatgcccagctaattttttgtatttttggtagagacagggttcgccagttagccaggctggtctggaatacctgacctcaggtgattcacctgccttggcctcccaaagtgttgggtttataggcgtgaaccaccgtgcccagccaaaaaacagatattttgatagaggtgataataaagttagttttttatgcacatgccactgatttgtacatataatgttctcttaaatttaataaagggattttacattaatagaagacaccgtttctaccaataagcagtattggtgattttattttacctctattttatgtttccagtgactaatgttcataactagagaacaataggtatcagtgattaaaaaatcagtatcagtgattaaaaaatcagtatcagtattaaaaaatctgttctgctcaatacacacagcaaatacctggcaaaagaaagactaacatttgctgtttattttaaagtgttgtcttcagattcacaatgactctaatcaacagttatttctagcatcctagtcatgatcataacaacataatcttgggcaagaattttaattttacaattcttcttcatttcataagtgcataaggaattagaagatgtaagacacaactcttagcagtagctagctttgtaagtcttcttaaatattgttattaaaggtctttagtttttgtagtgttttaattacagtcaaatgccaacaattaaatgtcaattcattaaaatgtcctacacagtcatacattaactggaggtctgtaaggttgtcttttaaagaacttcttttcataaaaacatgttgaaggcaattttgttgtttacctaaaatttctccaaaaataaagtctattttaaaaatcatcttgaaggtattctctcaaataacgggatatttgaaatgcaaggaagtcaaggctctcacttgacaatattaatgtttatctaatatgtacggcagttaagttagttattcatgtatttcacaacagcctagggttttttttagatacgtgaaggtaaattcttttagatgaggaaagttttttcataataagtagcaaaacaagtgtttagtaaggttggatttccggtccattaagcatgtatacttttgtatgtcattagggttgaaaacacaagagaatcttgtgaaagcttatggagggttttacggaagagcagactcataggtagaagaagagtgaaaggtagaactataatgtgggattagacattatgaccactgaggaagacagcaatctccaaagcaggaaatgaagtattgacaaaagcaccaagactttgtttgcatagcttttttttgcgatactctagtaggtaattgatattacctaccccgctttatagtttatgctactgtttgttgttgatctatactttaaattgtgccttttctttttgcatttcttctgtgatagcccaaaaagttattatcattatttttaaagtattaaatgtataaaacaaaaacctttgcgtcaaaactgtgtccatcaaatcaaagactttatgtttttcatcataatgacccttgatgtttctgtagcttcttggacactcagactttgttaaacgccctcataagccaatgttgaccaaggttaaaaacccatatccagtgattttataatatccccagttctctaaactgggagttgccacaaagcccccataacttgctcttctcgacctatatctcatttggatttccatttgttttcaatgaataaggtattggtgtataaataataagtcacttctgagttccttccttatatttcactttatccgttccttctctgtgctaaagtatctattctgttgcagccgcgcctctccatgtcttgaacgtgacaacagcaggtgaactactgcataattctttctctgaacatgttgcctattcctctccccctttcgccatctccttctgcatattccttgcctcaggatgctttagtgtgaagatacctagccaaagagatagaaagattgatgttctccaaattgtggctattgctgaattcccctttctctgtgatgaagagaaagtggtatttttaatttcagtggaaataaagtggggctgttccagacttactgtggactgcctgtcttggtcatgggtctccacatctccagcttcttttgtgagaaaaagtgctacatagagatgaaaaatgttgttccctacaattatgcaaattggtcaagctattttagggttttattaaaggttatgattttaagtggcacttagcagagagttttttgttgttctgggttttattttaaataccatattctaggtgaggcaaaggctgaaagtgtattagtagtgcatttccttgctagtactgctataaatgcaaccttttgatattttagaaattgtactgtagcatgactagtcagtgttctaaaaatacctgttattctgttatttatttaaagttatttttaaaggttcctattagactgctaattatagtatttttattatacagccatccattatggtactacaaattatcagtctacaaaaaagacagttttgtgtttttatttttgaaaacttttatatacatccttatactttttctcaaatgcacgctattgtctttccatacgtgaacacagtggttgataaataattgtttggtgattttaaaaaatttgaaccacttttttcaaagccatatccaagcaatttttaagtttatagaatttggagaattaggaaggaattaagggaattacagaggagaaagagctcatgcaatggtttgtctcacagtacctcagaaatcggatttaatctgaggccctcttgctatgtatatgaggatcactgaagcactctgatgattttttttcctgttctttcaactaactctgaatgctgcaatttcctccccattcccatcccatggtcctcaaagaattaaaaataaaactaaaggaatagtaactttgggggtggaggatgtagtcctcaaatgactggatcatggttttctcctgcctcctctgaagcatgtactgtttagctaatcaaattgtgtatttgtaggcaagtcatctgcataataatggttgcttttgcttttattctttttaaattgtgataacattgtatctcacaatttagaaaacttcaacaagagtttctactttgcatgattgctgaatttcatttggagagtaagagatgcaattaaagctgagtgttaacatgatattttttgtatgtacagtcttaagtcaatgtttagtgcagtgtgtgtacacattttctgcaaaacagctgttttaaccataaagcaaaaatgatatatatttcctgaagtaatagcagtttattttccaattaagaattctttcagagcatctgaaatgaaaggtttaagtaggtttcctaacctagttaacagtaaactgtgcatataattttaatactggaaggcaacttagagtctatttagtataagtctcccattttatggataagaaaactgaaatctaaagatgttaagtgacttacctgaggttacaacattaattcaagatagagatataactagacccagggaagagcatggtacttgctgcattctcctgtgctgtgtgataatagtatttttatatcttatttaagtaaacttcataaactaataaaaacttcatcatcattttaaactacttagcatagttccaggttcattgtaggtactcaataaaggttagtttctccatttatttttcaagtggtatattgtattgtgtttaagatatttaaaatatgtaaaatcccgtaagtgtagagaaaggaagatgatgggaacaagcatttattgaattccgtatgctttacccacacaagatttctcactgtaaccttaagtggtaacaggattatttttcattgccaggtgaggcttcaatcttaaagatcatagatgacaggcagagccatcaatccatattactgcctcctctaaacatatttaattatatgtttttacttaagttattttcatctccaaatgtttatggggattatcttgtcccatttttaatctcctgcaaacatgagaaaaatcacattgattcagtcaactccagtatgtgaacgactcatctcgcgactcacaccttctaacctttctcatttccctgtggtacataaaagtacgtttgcttacaattttttttatgcttatttgcagttgttttttacgtggtagaatacctgtctcctaactctactacctgtccaaatagtggcacttttgggtattctaatatttttaatgaaaatgctcagatgcttacccaattttatattatcaactgttgggattcactgataagcatacctattgtcaatagacttttcatcagcacctagctataaacttgagttatttttcctgttccttcttatttaaagaaaagacttcttttattatgcaattctgtaaattcagcatttttatcagttgtttggcaattccattatttgagtctaatttgtttagagtattttcttgctagattttataaacagttttactcattttgactattaatatttagcttttttatatcttccaatatttttatttctttcttgacatctttctgttttactttcttctctctcttctctttctcttctaaagaaaatttcctcactacaacttggtgggtttttttggtttgtgtttcttcctttagttacttgataaaaacacgaaggcttgttttctttaaaaatttaatttaggccaggcacagtagctcatacctgtaatcccagcactttggaactccaaggcaggaggattgcttgagcctaggagttcaaaaccagcctgagcaacatagggagaccccatctctgaaaacaaacaaacaaacattagccaggtgcaatgatgctgcctgtattcccagctacttgggaggctaacatgggaggatcacttgagccccgaaggtcaaggttacggtgtgctatgatagcaccactacactccagcctgggtaatagagtaagaccctctctcaaggaaaaaaaaattgttttttctctgaattatgcatactggcacctgaatttttccaatttgctttggatttttgtgcaatacttaaatattactttccaggtttacaatgacacagagatacttataggtaaatttatctgcttgcagcttcaggctttaaagtgctattattttgattttcccatctttggtctttcttcatataattttaacttctattaaaatggtttattttgttaaattcaaacttctggtttttgcttactctcattttctactagtcctctatcaaaggaaatcaatgtattaggtctctctatatacattagagcaggaataagcctgtaggagaatatttaacattcaggagagtcgttcccaactgctttcctacatctgaatatagtgattcgaatgaattctgactgctctgattgtccagagactaaagaattaaatttcctcctatgttagccttagacataaatatatacagctcctcacgtcttgcccttttcactaggttgtacattcgcttattcaacagttatttattgactgcctgctaagtgctccatccacactgtgccaggctctagaggacacaggaagaaatatggagaacatgttcactgttattatggcacttttatggctcctatgtgtggacttagtcatttctcagtgaccaggaaagtaagcagttccaagtaatgacgaaaccatcatgtgacatctggggcttacaccatgtactttgtggcagcagctgctatgtctttactttctgtatcctcagttcttagcagggcacttgacacttaataggagggtaacaaatgttgcattgaaaggagcatagaaacggaactatagagcaagtgagaacaaaaagagagtttcaagagacacagtcaatgacacaatcagggcaagtaatctaacctgtagttacttaaacattgttacagtcaggaacttagctacttcaattcactctttagagaatgggccaccagaagatactctacatgttcttccatcgaggctccatgttatataggccataagccatcactggaataaatgtagtggagaggttatagcacacaacatgagcgtggaaacttactaaatgccttcaaaggtataaatagtactgaggattgataacattaagcaggtgtattataataattccttactagtttgagttcctgtctgtgcaccaatggaggcagcaaccaaaagatgaaaaaaaaaacaaaggaaatattaatcttaattatcagtgagtcaaaaatattgcaatgaatttggaagtagcactagttgaaacttgtcactttttgctactttttcacaaaaaccaacctaagtatcctactcaaataagaacaataaaatggaaaggaaaactttacatctgtctagaagtgttaccagtattttcattcttttgagcaacaaatagttcatttaaaagtcaaataaaaaaaattttaaagaattcatactggaagactagtaataagaaaagtggcaaatattttctcattatgttttggtaaagaccagaaacatcaacacttcagtactgaactgttgattgtacttcccagtttttactccttcctgaaaactttaagcgggctaggtatgaatggaaggtctagcctggcccctgcatgtgggaaggcctgtgctgcctcttgtggtctcatcctgcatgacatgcttcagacaggcactctgggctccttcgcacccatttttattactagcaacaggatttctgtttaatagcatgtttaatgagttctgtgttccgctttgaagaagatgctaagatatttttcttcatttatctaaaaataacataaatgttttgtgtttatatcccataacttactttgataaaatacctttcaaatgttttaaatgtcgtggaggcaatatctaggtgggacaaatccagttggttctgtgctgagcagattataagcagagacatgatacacctgtatgttgctttcctcttcccattttggtgtaaagatcttgcaaatgcaatgaaaatttgaaaagacactaatgtaatttgtgaaagagagtacacacagtttgtatgtctttgtatacgtatacacaacacttagattgctgtgttgtttaatttttgctcctcgacacagtaagtgcctgggagactttaatgagtgttaataccaaccaaatgacaagcattcaaattaacctggatcaggatctgctaagaccatcccaaaggaaacaacttcaaagttaagacaaacccgttctcttggtacacttaaagaaaccaagtcatcttggattatagttctcctttttcatgaacaattaacctagaagaaaaggagaaaaattaatagggatgctgttaacatttctaaattattagctataattttttacattcaatttattacaatttgagaaaaatcatgatacagatgatacagatatcttccagcagcatgagcccagggtttcccactcctgaaatttcacttcaaaaatggtgtatgggcgggcctacttgttccctatccacctgctgttcatttcaattagaatggtatggcagagagattcctactcaataagttaaaaagtacattttaaccagcaaattaaattagttcaattcaaaagatttaattattttgcatttctcctcctttagaatataatcagttaaaaatctacatcctgggtaagatgatgttggaacaggatgcagaaaaactgcaatttggtctttcctctctgctttgtccttgtattatttcaacatgtagattttttaggatgtacacataaggaagcagaagtctttccatttataacaaaaggaaacttgtcaattgttctttatgtaatttcattccattttccttcaaaatcaattaggcttatttttaatttacagtttatattgaacatcaccattgtcagcaaaaattagaattattctttacagattaaaataatataaaaattagaacaacaacaaaacagaattaaaggcattggtataaagtaaaataacttttaaaaacaagcattttaccaccatgcatttaaataaaaaagagagattttgagacaaagcattacgaaaaacaacttgacaaagcttgttcatctgcccccaatatttcaaaacatatctaatcttctattttaatttttagtttcctggttagttttatggtggatgcccgaggtggtgctatgcgaggatgcagacacaatgggctccgaatcattattccacctcggaaatgtactgctccaacgcgagtcacctgccgactggtcaagcgccacagactggcaacaatgcctccaatggtggaaggagaaggcctggccagtcgcctgatcgaagttggaccttctggtgctcagttccttgggtaagggtttctgataaacctcccacttagtcatcgatgagcttgtgtcctctacatgaaatcactaggatggaatggaaaaaggtacgtcaaaccattttgaaagaggatcagcaccaatgacatttttaaaattggaagtagcacctcaatgcttgactccacttacacgcctcttattttaaggcattaatgagttaaacattcaggttgaataccacttcttctttttggatgttaataatagctgccagacccccaatgtgaataaccagtattttagccgatggtaggtattattttctcatctgagaattaagtggtaaagtcacaaagaaaaaattctgctctgttccaagcataaatgtaaattctcatacagttatgaaacagaatcattatctttactttggaaagcaatgttgcctttacagaatacctacaaatttaatcaatgtgatttttttttcagctatcaaaattgctaccttgagccttatcattacattggctatttagtcacagtttatattaagacaaatacatcaagactagcttccaccgtgctcgttttggcaattttgagcagaatttagcatttcttctttcttctgtttgtttgtacggctgctgttatattaagtggcatttcattgtgccaagaaatgaatagctacagctgaaattaacaaaaggatgaagttttggagggggacaagtttcaaaatattttgaaacaaatcaattgtatttaagtcttggtgcttgaaatactgggagaaaatcctaataatcgtgaactcttttactttgccgatgtcatattgggaagaggatttcttgctttagaactcaggaaatgttctaaagctttgtaatttggaccaaactattagcagattgctccaaattatgttcacacctgaaaaggggtgtgtttatatttcccaattatagcaaccacttctcatgtcctccagtcagacagaccagagctttacaaggagcctgtgaagttctgggttgcatcagaaaatgccattatgtttggagtaattccccaatgattcttttcatattctgtgtcagaccctgttcccctcgtgctcagatagtttaggctttttaataatcttcagatctgttggggaatatgcatgaaaacatctggcctctgtacagggcagagttttcattatattcccaacagcttgtctttcttgtggagcattttttccccctttttggctagtgccctggcggtgaacctaattagggacagaccggacagctaagtgctctccttgcacagacgcgcctccattgtacactctgggtctcggttccttgctctttgtgaccaatggagggggcagaaccaaacgcagtgtgaaaccaaagttcaccctgtggatcagctggcgacgctggggttctgtggaagacaatacctgaagcttacctatgttctttctttcactgctgctttggatgtactcagtaaacttcacctgccaacggctcctcccccacttaatgagggagaaagtttggtcagccgcattcttcagctggggcctcctggaaccaaattccttgggtaggagtgacttaaaacaaattgatggctgctggccccccattcttctccttcttctgcaatatgatttctcttttttgtcattgtgcccatgacatgtccctttctatgatttaaattctgtataacctatctttagtggaccatttctgacccttgtggtatgtgacttttatttttgagtgatgtttttatatctttccccttaaagtgctgtgaccttcattttcgtttaagcatgagatctgcctagttgtactatgtgctagttatgatgttgttatgatgaatttggagtctgtatcaaagcaacctggacccaaaaatcaaaaccctctacatattttgagaacgaatgtgacctaaaaataatagggcagtgcatgttccggatcctgaatataataggcattggacacaattgggctgtctgctgaggggctcaattagggccacactgtgtacacatgcctattgtttccttgaatgaagaaaatataagcaaaaaccacgagtgcatggctctttagttcacaagtagtcaactttctgacatctcctcatttacgacacatcaaattatgcaatgtgtgagccattttcctcttaaaccatttcgtcattttgcaccttgtcgaaaatgttttaggagattggcagacatcatagatatgcatgtacatttcttttggttaaatgtgttctacttacatttatcaaaggagaagttccagaatgtcacatgcactcacagggaaacattatttggcttaaggtagcagcatgtacctgaggattggtgcccctgaggtggagtgctactgtgtgaccatctgctagccagtgggctccaggggatggcccactatgtccctgtccccagcaaaagaagaattccaggtcactttgcaacagagtcgaggtgcttgtcttgctgttagttagctcctgtccacactgaatgttctgcattgctatgtcaggcctgtgatcgtggagatccctcactttgcggcccttcgaggaaaggaaagggaactggtggtcctgcgcagtgagaatggggacagctggaaagagcatttctgtgactacactgaagatgaattgaatgaaattcttaacggcatggatgaaggtactttcagatgaagcgttttaaaagaaatctaaactggaagcatgaaaatgattcatttctttcttatgacctaggggtgtgtgtatatgtgtgtgtgtgtgtgtgtgtgtgtgtgtgtgtcccttgtggtattttactacagcaggtaatctgctttgctcctgtagtgatgagttggaatgcacaatacttttgcttaattttactcctgttacattcaggaaaataaaagccttgaagatatcaaacatctcattaaagagatgcagcatgcttccatttttagtgtaaacttttttgagccgaaaatgagatagaatagatattgttgcttcataacgaaatgaactgatactggataataaatccatgatttaaaacaatgcctaacttgaaacattagatatttaagatactgataaaaagtgttaagctactgtgttggaaaacttacatctacccataattagtaagttatagaatactataatttttaaactattattaagggggtaggaaaattaagttcattcaatttcctacctataattcaaacagggagttagccagggttgaattgcatacacatacatacacatctagtttaggaacttagttttccattagaacttcaattgctgtaaatctcaactctgtcttggactgcacaaggttgtaatatctcagtatgaaaagaggaaagcggctcttcctcaggtctccatagtttgcacagagaaaaggtcctagacctaatagtagaattcacattcaactttaagtaactacacaaatagggcaagttctttgcctgcatgccaggaacataccaagttttgtatacagctagacactcaagagcaagtatagctgtttatcaagttcttgagtcttctggcactagtttcagatatggcttatggataggaaagagtagcctgaccatcgcttctttaccatttctttctacatcctaccacggtttgaataagaatagaggccaggcttatcttatccaaggggtggatggaggaagaaattatgccctctagatatgttaagtcaatatcttctaagcaaagaaaaaaatcagggtttttattaataaaaattgttccctacaatatttagctgcttctacttcttggaaccattccttttgctgacatttaggtttaggatattttcctctgagatatttacctatcaatgacactgccagtgagcattggtatcttgcccttggatggggacccactctttaactttatttatttaaaaatgagctttttacatgggtattaatagaaagttaatagattaattaatctattactagaaagttaatagattaattaatctattactagaaagttaatagattaattaatctattactagaaagttaatagattaattaatctattactagaaggttaatagattaattaatctattactagaaagttaatagattaattaatctattactagaaagttaatagattaattaatctattactagaaagttaatagattaattaatctattactagaaagttaatagattaattaatctattactagaaagttaatagattaattaatctattactagaaagttaatagattaattaatctattactagaaagttaaagatttgtgtatgtctggaaattttaaaaataaatataggctagtatttgccagtgcatcagtcttcaatcatgtggaatcagatcctgggactttttacttttactatctagctatgcccaataatcaagaaaaacgtagttgctgttcctgcctctataatgaattgtaaatgatttctaaaaatgaacaactttccatcacctcttaaaattcagtgatctatatagtgcacattttctaaatttaaactagtttgattttttttgtattgccctgaatatctacactaatgcaatttataaagaacccatgatcccatcctcttgatgttaaatgttatttttggaaatttaatggcatcaggggaatattgaaaccctgaattcctaatcactgattttttaatatccacagtgagtacctcagacacaacccttccactggagtaaactcataaacatgactcttactcttccaagatagattttattcctgcattattcccctgaaaacccaaagggctatgttacttcttaaaaccacaataacttggatttgagctaactttgaaatttgcaaagaaaaggagcccagaaacaacttcctttccatcacatgaaccaggaatagaacacgttcatttcattccatatttgccctcatgcctctcatttcaaaggtggccctgcaatgctgcacctagaactaaatgtttatctttctcagtgacctggaaagtcactgagaagaaaggaaacatgcaagctaaatgctgacagatcttgaaatattgcaattttttgttttctggtgttgttaggatagccttgctttttaaaattgtcctgttgtttcaaaaaaatgtgttttgctggcacttctgttcattattaaccgagcgaatgagttggctagaatgctgttagaaggaaatctttgctatgtgaatgaaggtgggtcatttcttgtcttagtactggatagcccagaagacctagaaaagaaacgaatctgccgcatcatcacccgagacttcccacagtactttgcagtggtgtctcgtatcaaacaggacagcaatctgattggcccagaaggaggtgtactgagcagcacagtggtgccccaggtgcaggccgtcttcccagagggggcactcaccaagcggatccgcgtaggcctgcaggtatgcccatgttagatgcaaatgatcctaacaggattgtattctaatgattaaaaattagctttgtcaaggactgttacctttgttttataatcacaccaaaaaggaaggtagcattaatggtaaagctaaagtcaaaatccatatttattggttactaatctatttaaaaattcaacttatatttggacaattaaccaaaattaatctccagctacaaatgttttcttcttgtaaaaaaaaaaaaaagaaattagcttttaaatgagaaataaattgttaaagaatcagattattcctagtaagcaagagctgccatcagagatcgtggatcttacaaaattttatgagtgcttagtaataatactgaacttatgattgccatatttgaagcccaccaaacttatttgtaagataaaaaatactttggggaagaaatttgaaattaagtataatgattcattctttattttaaaatatatacacaaatatatatgtgtgtgtttttactttgaaaaggctcaacctatgcacagtgagctggttaagaagatcctaggcaacaaagctaccttcagccctatagtcactttggaacctagaagaagaaaattccacaaaccaattaccatgaccattcctgtccccaaagcttcaagtgatgtcatgttgaatggttttgggggagatgcaccaaccttaagattactatgcagcataacaggtgagtcacatatgactgtgttcgtagagagttctgaaaaaagaaacttagatcgttgtaaatattaaattacctttgtcataagatgtctgcagggtcatatgcattaattcagggaatacattttaattaactagggaaatgaaaggtgaaaggaaacaactattatttactaaatgaagtctgtatgccaaactgttagatagtttatatgcgttgtcattctaatctccacagtaaccctgtgaggaaactttaaccccgtgttgctgagaaggaaaccatggttgaaagaagttctataacttgcactataaatatttggtggtgttgggattcaaaaccacacccatatgtctccaaagttcaggcttcaagccttcattgaagagatcactaaatctgctgggaaaaaaaatactgtcttgagtaattatacccaatagttcaaaccaaactgttatgttatggaattggttatgtctttatcattgatctattgaactaactttagaaaaacaacttaaaggttttcagtgattaactgatttttggtcttttcaattgtggttgtgtagtcgctttcagacagctaccaaactctccaaagacactcccagaacgttggtagtctcttcataacaatgccatcacaaatagtgagaggcaaaaaaattcacatgaataatctgttctagggctaaataatttaactgataatttctctatcaataattacatggtgttggtattcagtaaatattagtactattattagtaggaacagtaatcatccctggatgtttttgtattgttagaattattattttcatttctctttcatattggcagaatgttcacctttattttgttttctttaattcacccttcttactcgtatgtttcttgtagttatgatagagaaccacgagattattccataagtttaataataatgagtggggggaaatcatatgcttcacttatgatctctttcccagttgctcatttttggttattgctatcatttctgggtatctttcccataattccagccccgtagatatatgattaaccttctataatgtgcaatataatgtcatggatgtgaaataggtgaggcagaagaatatctgtgatacgctctgcccttatagtgattaaataaacactctaggggcctaaacaccatctactctatttattccagcacaatgtctttagacaggtttctcataaacatttctgaaatttaattaaaattattttaaaaattaacaaataatttaatgtattaattgtttaaatacctagatatttgagtctttgtatttttctgtgtcatgtagttatgctgagtatgtattttaaaggcctactagaataaacttccataaactttctttgataacttgttctcttctttaagaaactttagagtcaagacttttcttcatttcaaacatatattcctcctacagccctttgaactaaaattttgtccttatctatgtgatcttaatttctcagtagacatgaaagacaggtagtcaccattagccttcatggtagtttttcaatgtacaggggccatcctttgatattcatttattttttcatttaccttgcaatatttattgagctcttactatttcacaaacattttttggctaaacttttattgcacatcgagaggaacttttttgaaaacaatttcataaaatatgaagtttaagaacaaaagaatatttagattgttcacttttttttttttttttttttttttgagacggagtcttgctctgtcgcccaggctggagtgcagtggcacaatctcggctcactgcaagctccacctcctgggttcacgccattctcctgcctcagcctccctagtagctgggactacaggtgcccaccactatgcccggctaattttttgtatttttagtagagatggggtttcaccgtgttagccaggatggtcttgatctcctgaccttgtgacccgcccacctcagcctcccaaagtgctgggattacaggcatgagtcaccgcgcccggccgattgttcactgttttaacaaactgttcagctccttaggtggtcaaaggatatttaaaaataatcagctgtatacaattcaaaattatcttcagagccttgcaattataataaaagcttcagaatgtcaggaagagaacagaaggcttaataaacacttattcaaataactaccctaaaacttagtttcttgagtggtagtctgctgtttgttttcagtgtgtcattttttagcatgtagattttagtcattttgttttcaatgtgccattttgaggggtgggatttggcttgtgaacacagaaccacaaagactttattttagaatctagagtctggagttttgcctgatttttttcaacaatcatattatttcaggtggaaccacccctgcccagtgggaagatattacaggaactacgccattaacatttgtcaatgaatgtgtttcctttacaacaaacgtgtctgccaggtatcgttatatagcacagaaaagcccactatgatatgttaccctccaaaaaaactgccctttgttttattttgtttctttattgtttaaaagttattttttcattggattttaaatatggtctgcctttgcttttatattttaaactagatctgtcagcaagtggaatagtgataatacagtaacaaagtattaccaatccgattaaaatctaaggaaaaggagcgattgtctgctttgcctgtatgattctgacttagtcagtagcagctgctgctttttccacttccaaagtccttaggaatgataatttcctgttgtcagcaaaatagcctgaactacttttccaacagaatgataacagcacaaatctcaccgtggtttgtctaaaaggcttagaggcttcagtggctcttatatacatttcttatttatgtattacatatctttaaaacgatgaagctatctagttttattgcttatgcacacaataactcaattgattaaagttagctcccattcctttgatctttaattgattgctaagcattgttacctctctttaacttgacattacaactttgtgacttaagtagggcaagagacattatgtccattttacagatgagaaaactgaagttgagagtaattaaaacgtacatttctatttggggtggaggagaaaacataaaagtgcatgaatagttaagtaatggcatagcaatagttgggtgtggtggcacatgtttatagttccagccacccagaggctcaactattgagtccgcagttctgtgtttcaatgtgttttgccaatttagcatctatactgtaatccagaagatgacatgttctgaataagagatatagaccagagggactaaaagaatgagagaagggtgttcgaattgggatagctagagagggtatctgagaagaggtgactcgagacatgtgttggaacctaataggcagataaaagtgaaaaagagaataacatgagcaaagatgcaaagatagaatgagaaggtgtagtgggggatagcaacaattatccatgtagtctataattcaaaaataatacttgaggctgggcctggtggctcatgcctgtaatcccagcactttgggaggccaagacaggtggattgcttgagcccaggagttcaagactagcttgggcaacatggtgaaaccctgtctctcacaaaaaagatacaaaaattagctggacatggtggcacacacctgtagtcctaggaaccagggaggttgaggcgggaggatctcttgagcccagagaggtcgaggctgcagtgagccgtgattgcgtcactgcactccagcctgggcgacagagacgttgtctcaaaaacaaaacaaagcaaaaaacaaacaaacaaaaaacaaacaaacaaaatctaggactgttggttgccaacactttataaaaggtcttacagggtagattaagaagtgataaatcactgcactccagcctgggcgacagagcgagacaacgtctcaaaaaaaaaaaaaagaaaaacaaacaaaaaaaacaaaccctttggaagtataaaataacaaaatgaaaatatttccatctaatgacctcgactttctttgtgaagttagctctcttagggcctgtggtgagggatgaagcttaaagagtgtcataagatttagtaacgttaccatagtgaacaaaaaattgccagtcaatgtcacagacttagttgaggctggaaatcataaagtcattatagccaataatttcttctatgaattatattcagcaatacttaggagttctggagcaggttttttaaaatggttgggttgattccactttggtgattagagttccatggaaaagaataacgaggggaggaaaagctgggtagattttgttgaaaagagtttcaggaaatgaaatgacagctagggaggggggatcaaggaaaatagaaaactatgcagtgagatccttgtcttatgtctgctattgagttcactccactaaaggattccaaaacactaaatatatagttcagaaaactgaatattcagaagagtttccaaaaaagaaaattagaaatacagtatttaatagttgatcttaaacctgatatctttctctcttctcttcactcccttctgctttcccttctttcctcctacctttccttttgttcctgtcttgctatttctttcctttggccttctctcattatctccctctctcacttccttttttccaagaagcatttgttgactactttgatcatattgaaggaactgattttatttttcacatggtatactttgaactttagataactgactttatttattttaataggttctggctgatagattgtcgacagatccaggaatccgttacttttgcatcacaagtatacagagaaattatctgcgtaccttatatggccaaatttgtagtgtttgccaaatcacatgaccccattgaagccaggttgaggtgtttctgcatgactgatgataaagtggataagacccttgaacaacaagaaaattttgctgaggtggccagaagcagggatgtggaggtactgtaccaaaaataataataataatttatgccatgttgttatacctgcattaatagattacatttcaaatatcatttaataaatagaataattaaaaagtgaaagacaagttcgcattttggtcagttagaaggtcaacatccaaaatctgccatttttagccattttggacctattcaataggaatgatctgtgcatgtgagaaggtaagatgattcctttaaagattatttgaggaaaaattatgagttattgataaactcaaagtatgtaagtgactgtagtactttagatgtttttagctttccttgttgtccttattttttaatagtaactaaaacagtctgggaagtatatctttttgcataaatgttgaagcagggtgtctagtgcttttctacattactttttcttatttcagaattttccatcagtgtaggtctttgggtgttgaagtccagtaacctgactcattgtgatgtcaaaagttacccaagcaggccaggtgtggtggttcacgcctgtattcccagcactttgggaggccgaggtgggtggatcatctgaggtcaccagttcgagaccaacctggccaacatggcaaaaccctatctctactaaaaatacaaaattagctgggcgtggtggcagatgcctgtaatcccagctactcaggaggcagaggcaggagaattgcttgaacccgggaggcggaggttgcagtgagccaagatcgcaccactgcactccagcctgggcaacagagtgagactccgtctcaaaaaaaaaaaaaaattacccaagcataagtttaaatttaggatttaaatgtattttggggttgtggaataatgggatacactttttggaatgagaacattaaatgtcaccatgcattaaagattcccattactagtaagaagaaagagtgctggacatgctgtgtcacagatagacagaatgtcagttgtcaatttaaagatggttgtatgtgtattataagaatttgaagttccaagtagtactaccacttctttgtgtaaacaacaagtataattgcagctactttattgttatttctctctgttttcactcaggtgttagaaggaaaacccatctacgttgattgtttcggcaacttggtaccattaactaaaagtggccagcatcatatattcagtttttttgccttcaaagaaaatagacttcctctatttgtcaaggtaatatatacatggaattttgtgatgcatttttttcaagatcaaggcagaatttgacttcctttagtaatagaaaattttcgcttttcagtcatcttcagagttttctttttaaccatatttgtaacgttttacagccctgggaaacaaatcatttttatttttgaggttcaaagtcaacctgaatttttatagactatatttaaggatgagaacaggacaaataatagccaactcattaattaggcacagtgaccggtattttccaaatttgaaggaaagcttatttatctattataacttttaaatatttatgcttagatttaaaaatacacgtgaacttcacaagtgtggagatcaaaagagttctaagtggcaactttttgtaataaaatctctcaaaagacccagcatctcacttaagctagtaaattatctgcaatagagctatagacttgatatattttcataaattcattcaataaacagcatggagacatttgtgtgcaccaggtgtttgttgtctctaaacagagaccaagttagggatttgaggtgatatatgcaagtttcattttagattccaatctaaaagggaccacatatgaaggaataagagattcaggaaataaaaaggaggtaataattctactctgcattattttccaagctcatttttcttcttgtttctcacaatttatttcactaatccagaggtcctaacgctcaatcctcttaggtataggctggcttctgtcgttttttttccaatcctacttcacctactcatttccaactgttcatcagcaatgactctttttattttaaccacttattatttttccaaacatgtgtctgcaaacctcttattaagtttttccaagatctctgctgagtctctttcattgtgccatttctggttcaattgttttgcctgactgatgatagattcttacagatcaccacattaagcagtaactgctcagaggtaatggatccatttaacatagacagctatataattaagctaatgtttgacatcattggtgtgcagaatcattctacaaacaacccaatacaaaatgagggaagtgcttcagtagacatttctccaaagaagatacacagatggtcaataagcatatgaagagatgttcaacagcgtagggaaatgcaaatcaaaactgtgaagagataccactccatacccattaggatggctattattacaacaaacaaacagaaaataaacaaatgttgggaaggatgtggacgaattggggccctaatgcattgctggtggaaatgcaaaatagtgcagcgactttggaaaacactatggtttttcctcaaaaagttaaacataaaattagtatatgattcagcaatttacttctcgatgtacacccacaagaatttaaagtagagactcaattacttgcacaccaatgttcttagcagcattagccatggtagccaaaatggaaacaacccaaaagtccaaaggtccacaaacaaaatgcggtatacacatgcaatggaatactattcagcctttaaaaggaaggaaattctagtttatgctgcaatatggtaaatgaaataagctagacacaaaaggacaaatattgtatggtttcacttatatgaggtacctagggtagtcaaattcataaagagagaaagcatttgtttttatttatttttttgacctctcctcgaagtgaaataaagatagaaagtagaagagtggttgctagggacaggagaagtgaagaatggggaattattgtttaatagatacagaatttcagttaggaagattaacaagttctaaagatggaaggtagtgatgattatacaacaatgtgaatgtacttaatgccaccaaactagacacctttttaggtttaatcatttttatgattaaaatgatacgttttatgttacatatatttatcacaattttttaaaaaaggaatgaaattctgacacatgatgcaatatgaatgaacttggaaaacattacgctgagtaaaataagccagacacaaatactatatggttcctccatttctacatgttcctagaataggcaaacgtatagagacagaaagtagaatagaggttattaggggctgggcaagagggcaatggggagctattgttcaatggggacagtttcggcataggatgaaaaacattctggatagaagtaatgattatacaactttgtgaatgtgcttaatgccactgaattttctacctcaaaatagtaaaaatggtaaactgtatgttatgtatattttaccataattattttaaaagctgagtaagttctgaagatctaatatacagcattaaactatagttaattgtatgtaatgtattatatacttgaaatttgctaagagatctcaagtgttctcaccacaaaaaagggggatgaggtgattgatatgttaattaatttgatacgctaatcatttcacaatgtatacatatatcaaatcatcacattgtacaccttaaatatatgcaatttttgtctaccatacttaaataagactaaaaaagaaagctgaatgatttttaaaaaggctttccaaatggtaataggaaaagagaaaggaaatcctttgagttcttacctagcagtaacaaatgaattttacttttccctttcaagcatcatctagttaaagtaaatactgcaaatcaaatgtgggtgaagcatgtatgtctttcttgttcaaggtacgcgatacgactcaggaaccttgcggacgactatcatttatgaaggagccaaaatccacgagaggcctggtgcatcaagctatttgcaacttaaacatcactttgccgatttatacaaaggtatcgtaaaatctgctatagtgcaattcaggtagagtaggaattgatttttaaatcttgttttaggtcagtgcaaaagtaatggcaaaaacagcaattgcttttgcactgacctaataaaatgaataccaacaaagactgattgaaagcatgtgtaataatcacgtttgattctctgtcagatttacgatttccacttaagaaaaaacgtagtgccacctgatttcatgttaaatgcactttgatgcaaaaattctattaatacacattgggcatggaagtaagaaaatttggcttcagatttaactttttgaagaaatttttaaaactaattggcttttcttcattattgttttcatgtgctttcctgcgaccatactcgtgcatttggccctatgaaaatattagagttcatcaccttctgtttactaccaattcacaggtggcttacatattattaaattcagaactgccccgtgatattttattttttctaagtaattaactattaatcttcgaacttatcatattttaggagcatataaactggtgtgatggtgcacacctgtagtcccagctactctggaggctggggtgagaggatcacttgagcccaggacttcaagggcagcttaggcaacataacttgtgtaaattgttggttaaaataaaaaatagttgaaatagttgattagtaaaaaacatatcgccatgttttgagtagatttaaaacattgttgaaaaggagaaatacattaatttctgaccccaagtctacctacaggaattactttcttttgaaatctctccccctcacgtaattcctcgaatactctgatgaaatcaaagaagacaactaaatcaattaaatgttgtggataatttatgtttcattcttttaaatttttttaaccaatatttcttttgaataggaagctctcacatggcaatctataggtggatgcagaagttgtcagtgtctatataacaggttgggaagggtgatgagtggtgactgctgagacctggaggggaagtaggaatatatttaaaatcctaaatcttgacatcacaaaacaaaaaagtcctatacttctttttccccaccacagttgttaaattttatatttgcttaatgaattattcttgtaaatagagatcagccatctagagaaaagctcatagcattaggtttgacattgtaaatttttattaaatgaataaaataaaatattatttgtatatttaaatatacatgttattccaagaattaaaatatagaaatgggtatatcaacccaaatgagcataatttcattgtattttgatggtgcagaatgtattttggggtttgtattgctgattagtagtgagtcagtggaggcagtatgccaataagaacgacaaagaaatatgtactgctgcgggcaagccacctgagtgttaaagaaagatgactgagctttggctgatttcagtgagctttcagtgtgctctaagagaaagcattaacttcattattacattttatttctaagtcaagacatatcagacacagctattaatgctgtgatagtccagtacaattttctaatttgtaactcaaaaagaaaaaaatcccagacattgtacattgaaaatataccttagtatttagtagctcttggctgggcaccatggcccacacctgtaatcccagcactttgggagaccaaggcaggaggattgcttgagtctagtagttcaagaccagcctgagcaacatagcaagaccttgtctctattaaaaaaaaaaaaaaagaaagaatttagtagctctttgttagaataatgcttctaaatattgcctgtgtattgaaaattttccaccatatgcttatttgtagcttttagtattttcaaccaatatctgtaatgattgggatattatcatcactatttctaaagacaaatgccatccagttcatttaaggtcaaactttgagactgccgtggtgacctagtatctggaattagtatatttataatgttggttcttttgtctcttgaatctataaactttgtacttaagccaatcttcttttctgcctgtcttctataaactgttagtaataaaaaaagagtatgttgactgtatgcttgcctgttgatgcttgttgaaagggtatttatttactctttccttttcttctaaatactctctactcttccttctctcttttttccatcttgcatggcatcttggggcggaaaggaatcagagtcagatcaagaacaggaggaagaggtaattttatgacagtgtcacttgttatcggctgtgtcattgctgtaaccactaataagagcacatagttaacctgtgttcttagacggggtaggcggttcttcttagtaattaaaggggcacaattttacttaacctctctaagcctctgttttctcatcttgtggagcaacttaagggaatagtaaagtttccctgtaaattgttgccatgtcgctatgcaatactatatttttccaccaactgctaagagctaaaccattatctcaggggttcttagtcagaagacatctagtggttgaaactctttttgtactaagacattattaatgtcttaatttttaattaaatgtcttagtacattaaaaatgtactaagacattatttgccttttaaacttctatatcctcacaaactataaaggagtctcccagaggctatactacatgtgatgatattgccactctggcaattaatggaatgtatgcttgcatactcttaggttctagcattttctcagccttcatttgtaatatggatatctatttatacatatcacacaccatcggaagtttttcaggctcctcagtaatttttgggagtgtaaaggggccctaagaccaaagagtttgataaacactgagaccaaaaaactttaagaagcatatagctgattccttagactatatcataatgcagaactatgctaataataataatttcttataaagtgggatctttactaagtgttgcacacgcctcatcaatgtcgatctctcacaaacacctatgaggtgtttgttattaaatactacattattgatgaagaaagcaagtcttagagaggttaccttgaataaatagctgtatgaattaaacctgcttcaatatttaaagcaaatgtgtgtttgtctccgttataaagatctgaaaatgcccaaatattataatagaaatgaaaaacataattggaaaacttaaaataatatgtttctaagatagacagatgcatatgttattagttatatgtaaatgttttcaaatatactagttttctttttttaaatgttattccaatgcattcaaaataaaaaatataataaatacccttatacccaccagcttaaaatgtaagcccttatcagttcagaagatgccccggattcgttttttttctgataccttgcaatggagcagggtgagagaggtgactatagaagcactgtcctgccgcacatagccatatacacaatcaacttaagactgaagtcattctttccctcaactgcacagtcactctttgcttcacatactccatttccttcctgtactcagtgaccctaccactacagctgttaaaaatgatagggaagccaattttgccatgttcacaaatcacttttttctcttagataattttcctactgaatactttctggaactatttagggcaatagatccagttcatattcttttcaggatctggaatgctggcttattattaacgataatgaaactacttctgtagaacacatcaccctagtgttgctgtttgtcatcctttcctttttctccactaaatggatacttattattcaatactgacttcaccctttttctgatgtattccctaaatatgtattccaacatcaaaaccagcctgggtcatatcttcccaggattaacatgctagaaaggactttctacctgtagtgtctagaaaacagaaggtttttttcaaagtcaggataagaatcatggagactctcaggaaaaaatgtagcaaattactctgaccttcctatagctatggtgtcacccaacatgtataattatgaataggagctttttgtgcacaccaggggctatgagccaaggcagtatttgtaaccattcaatttatgtatgttttctttcagatcgatatgacatcagaaaaaagtaagaatttaaagaaaattgagtttgtttgaaagctggctaccataaaaagaagcatgaattaaaatgcaagctagttgctattactaaccactatagtaattacatttttatattatccttattaatcattaatatatttataaaagcagcttggccagttaaattacaaatatacctaatttgcgagctaattagcagtaaaatgcaatgattattcatctaagcattcactttcttttgacattcttgttaaccctggtattgctgttatgcttgtttagaaacccaccctaccgttttgtccatttgttagcaaaacactgtcatctcatcattttttaagcactgacatgacagtatcactttttatgtaatgcaatagtgacttctgtagagagctcattatttttgtaggatacacctgcaaaagtgatactgtctaatagttcttagctgaagctaaccccatccaatgcctgccccctcccccatcactcttttgcactttttactgtggtgaagtgtaaccaatgtctttagagctgaggtctaacagacttctgtgaaaactttctgaaaaaaaaccacaaaacaaaaataaacaaaagtgaagagccaagaatgcaaaattaaaaccccctggataaaattactaatcacaacagcatgttattatagggttaattttaaataatgatgcaaatcccaaacctgatctagtagagagagaactggttttgacagaccttaaaagagctatcttagaactcatttcaggtttgtaatatccaattaagattttagtttgttggactatttctagtgactctctggcttcttgtgtggaaactccagttgaattttacagatttctgcttttgtgccccaaatgctttttaaaaatctgatttttaaagtttattgaatatcaataaactttatttcagagtttattttgatttgctgtatttcacagtatattcccaaaatgagaaaacttagaaccatgtttaatatgctcatgtggccctacacaatgatctgagggcttttttaaagtcctaggacaatgtaatttactactaagttatggaagttgctttgaatgaggcttaccctcatgttaaagcattattcagatctagaatgtttgagattctggatgttttcattggtttatataattgaacaaatttgtattggtataaattattttaataaatttatatgtgtaaattcacatactgtatcttctcaacaaatacagattctcccaagagaaggcacttttgtttatatgacatatcacattgccctcactgattcctttttttaagtgattttactttattctcccactttcttcttcagaactactccatttatttaaatggcctcttactttgctctcctgatacaaactagtaagaattaaaaattaattcatccatatggctcagttgttaaaaaaaaaagaaaaaaaaatgttaccatgttgctatgatgccatggattttcctgaaggatttctaggtgttttgagtgtttcagaagttttaaatacagactcaagtttgcttttgatttaaagataatcattaaataatcttcatctaggtataaactaatctctaaagaagtgctctgtggaagggactcttacctgaagtctttttatcagtacattttagaagagtttactgagttttcttccttaaccttaatgggtgtaagcccccacaacctaagcctcaatataccaccttcagcagcttatgcatggactcatagggaaataagtacacttcgccacagtaatgttttacatatctgttctaaattcccgccatcctcctgcccatacgtttcagcaaggccgcctctcccagccgttttactccacctttgctttgcatggaaataacttggcttacataaactgtgtgtgtgtcccgtgtgactgtctctgacttgggttgccatgcatcacattttaactttggactcacttataagtttaatcacaattgttgtttctgttgtttttctttcctttcctttatttccctccttggtctgtccattctgtgtctaaacaaggaggttgctccaaggaaaggaccatgcctcgtagcaccagactgtttgtttcattgttaggtgtgaatttcccttagatgaaatgccggtttgcagctgattcagatgtattttatatagtctttgtatattggtagaactaaacatactgaatttcagacttttatatgattaaaaatgtatatacatcattagatgttattctgagcttgctactactggctttctcctagaggaaatcaactttctgcaatttctaatgctttttttcttattttttcctcatggttggttttcttttttttttcaacattgatctgtaacatctgaacaatcttgagatacctctgtgtaatttcactgcgttctttgttttgatatgtagtgtttttttgtgtgtgtatgtgcgtcttgttttagctttgttgtatgtgtggatgtgctacaagtgagaaaaattaagcaagttatttcctgctcatttttccttttcagttgttttttttttcgttagccttgctttgctcttgtaccctgaggccttgtggatctaccattcccagcccattttgttgcccctcccaccaccaccaccacaggaaaagacgctgtgtcgtttcagtcctgattacatttgccaatatcttttttgatttccattttactttcaatgtttttcattcacatcaaagatgatgagacagaatctacagaaacatctgtcctgaaaagtcacctggttaatgaagttcctgtcctagcaagtccggacttgctctctgaagtttctgagatgaaacaagatttgatcaaaatgaccgccatcttgaccacagatgtgtctgataaggcaggttctattaaagtgaaggagctggtgaaggctgctgaggaagagccaggagagccttttgaaatcgttgaaagagttaaagaggacttagagaaagtgaatgaaatcctgagaagtggaacctgcacaagagatgaaagcagtgtgcagagctctcggtctgagagaggattagttgaagaggaatgggttattgtcagtgatgaggaaatagaagaggctaggcaaaaagcacctttagaaatcactgaatatccatgtgtagaagttagaatagataaagagatcaaaggaaaagtagagaaagactcaactgggctagtgaactaccttactgatgatctgaatacctgtgtgcctcttcccaaagagcagctgcagacagttcaagataaggcagggaagaaatgtgaggctctggctgttggcaggagctctgaaaaggaagggaaagacatacccccagatgagacacagagtacacagaaacagcacaaaccaagcttgggaataaagaagccagtaagaaggaaattaaaagaaaagcagaaacaaaaagaggaaggtttacaagctagtgcagagaaagctgaacttaaaaaaggtagttcagaagagtcattaggtgaagacccaggtttagcccctgaaccccttcccactgtcaaggccacatctcctttgatagaagaaactcccattggttccataaaggacaaagtaaaggcccttcagaagcgagtggaagatgaacagaaaggtcgaagcaagttgcccatcagagtcaaaggcaaggaggacgtgccaaaaaagaccacccacaggccacatccagctgcgtcaccctctctgaagtcagagagacatgcgccagggtctccctcccctaaaacagaaagacactctactctttcctcttccgcaaaaactgaaaggcaccctccagtatcaccatcaagtaaaactgagaaacactcacctgtgtcaccctctgcaaaaacggaaagacattcacctgcgtcatcatcgagtaaaactgagaaacactcacctgtatcaccctcgacaaaaactgaaaggcactctcctgtgtcatctacaaaaacagaaagacacccacctgtttcgccttcaggcaaaacagacaaacgtccacctgtatcgccctccgggaggacagaaaaacacccgccagtatcgcctgggagaacagaaaaacgcttgcctgtttcaccctccggaagaacggacaagcaccaacctgtatcaacagctgggaaaactgagaagcacctgcctgtgtcaccttctggcaaaacagaaaagcaaccacctgtatcccccacttcaaaaacagagaggattgaggaaaccatgtctgttcgggagctgatgaaggctttccagtcaggtcaggacccttctaaacataaaactggactctttgagcacaaatcagcaaaacaaaagcagccacaagagaaaggtaaagttcgggtagaaaaagaaaaggggccgatactaacccagagagaagctcagaaaacagagaatcagacaatcaaacgaggccagagactcccggtaacgggcacagcagaatccaaaagaggagttcgtgtttcctccataggagttaagaaagaagatgcagctggaggaaaggagaaagttctcagccacaaaatacctgaacctgttcagtcagtgcctgaagaagaaagccacagagagagcgaagtgcccaaagaaaagatggctgatgagcagggagacatggatctacagatcagcccagataggaaaacctccactgacttctctgaggtcattaagcaagagttggaagacaatgacaaataccaacaattccgcctgagtgaggagacagaaaaggcacagcttcacttagaccaagtactcactagtcctttcaacacaacatttccactcgactacatgaaagatgagttccttccagctctgtctttacaaagcggtgctttagatggcagttctgaaagcctaaagaatgagggggtagccggctctccgtgtggcagcctgatggaggggacccctcagattagttcagaagaaagctataagcatgaaggcctagcagagacccctgagacgagcccagaaagcctttctttctcaccaaagaaaagtgaggagcaaactggggaaacaaaggaaagcaccaagacagaaaccaccacagaaattcgttcagaaaaagagcatcccacgaccaaagacattactggtggctctgaagagcgaggtgccacagtcactgaggactcagagacctctactgagagttttcagaaagaggccactctaggctctcccaaagacacaagccctaaaagacaagatgattgcacaggcagctgtagtgtagcattagctaaagagacacctacaggactgactgaggaggcagcctgtgatgaaggtcaacgtacctttggtagttcagcccacaagacacaaactgatagtgaggttcaagaatccacagccacctcagacgagacaaaggccttgccgctgcctgaggcttctgtaaagacagatacaggaactgaatcaaaacctcagggagtcattagaagtccccaagggttagaacttgcactccctagccgagatagcgaagtcctcagcgctgtggctgatgactcattagcagtgagccacaaagactctctggaagccagccctgtgctagaagataactcttcacacaaaacccctgattctctggagccaagtcctctgaaagaatccccttgccgtgactctctggaaagcagccctgttgaaccaaagatgaaggctggaatttttccaagtcactttcctcttcctgcagctgttgccaaaacagaactcttgacggaagtggcctctgtgcggtcccggctactccgagaccctgatggcagtgctgaggatgacagtcttgagcagacatcgctcatggagagctcagggaagagccccctttctcctgacacccccagctctgaagaagtcagctatgaggttacacccaaaaccacagatgtaagtacaccaaaaccagctgtgattcatgaatgtgcagaggaggatgattcagaaaacggggagaaaaagaggttcacacctgaagaggagatgtttaaaatggtaaccaaaatcaaaatgtttgatgaacttgaacaagaagcaaagcagaaaagggactacaaaaaagaacccaaacaagaagaatcttcttcatcttctgacccagatgctgactgttcagtagatgtggatgaaccaaaacatacaggcagtggggaggatgaaagtggtgtccctgtgttagtaacttcggagagcaggaaggtgtcttcctcctcagaaagtgaacctgagttggcacagcttaaaaaaggtgctgactcaggccttttaccagaaccagtgattcgagtacaacctccttctccacttccatcaagcatggactccaattccagtccagaagaagtacaattccagcctgtcgtttccaaacaatatactttcaagatgaatgaagatactcaggaagagccaggcaaatcagaagaagaaaaagattctgaatcccatttagctgaagaccgtcatgctgtttccactgaggctgaagacaggtcttatgataagctaaacagagacactgatcagccaaaaatctgtgatggccatggatgtgaggccatgagtcctagcagctcagctgctcctgtctcttcaggtctacagagtccgactggtgatgatgttgatgaacagccagtcatctataaagaatcattagctctccaaggcactcatgaaaaagacacagagggagaagagcttgatgtttctagagcagaatctccacaagcagattgccccagtgaaagcttttcatcttcatcctctttgcctcattgtttggtatctgaaggaaaagaattagatgaagacatatctgccacatcttctattcaaaaaacagaggtcacaaaaactgatgaaacatttgagaacttaccaaaggactgcccctctcaagactcatccattactactcaaacagatagattttccatggatgttcccgtgtctgacctagctgagaatgatgaaatctatgatccacaaatcactagcccttatgaaaatgtcccttcccaatcttttttctctagtgaagaaagcaaaacccaaacagatgcaaatcacaccacaagttttcactcttctgaagtgtattctgttaccatcacatcccctgttgaagacgttgtagtggcaagctcctctagtggaactgttttaagcaaagaatctaattttgagggccaggacataaaaatggaatcccaacaggaaagtaccttgtgggaaatgcaatcagacagtgtctcttcatctttcgagcctactatgtccgctacaacaacagttgttggtgaacaaataagcaaagtcatcatcacaaaaactgatgtggattctgattcttggagtgaaattcgggaagacgatgaagcctttgaggctcgtgtgaaagaggaagaacaaaagatatttggtttgatggtagacagacaatcacagggtaccacccctgacaccactcctgctaggaccccaactgaagaggggaccccaacaagtgagcaaaacccatttctgtttcaggaaggaaaattgtttgaaatgacccgaagtggtgccattgatatgaccaaaaggtcctatgcagatgaaagttttcactttttccaaattggtcaagaatccagggaagagactctctctgaagatgtgaaagaaggggctactggggctgatcccctaccgctggagacatcagctgaatcactagcactttcagaatcaaaagaaacagtggatgatgaggcagacttacttccagatgacgtgagtgaggaagtagaggaaatacctgcttcggatgctcaacttaactcccaaatggggatttcagcctccactgaaacacctacaaaagaagctgttagtgtagggaccaaggacctccccaccgtgcaaacgggtgatatacctcctctctctggtgtaaagcagatatcctgccccgactcttctgaaccagctgtacaagtccagttagatttttccacactcaccaggtctgtttattcagataggggtgatgattctcccgattcttccccagaagaacagaaatcagtaatcgagattcctactgcacccatggagaatgtgccttttactgaaagcaaatccaaaattcctgtaaggactatgcccacttccaccccagcacctccatctgcagagtatgagagttcagtttctgaagattttctatccagtgtagatgaggaaaataaggcggatgaagcaaaaccaaagtccaaactccctgtcaaagtacccctccaaagagttgaacagcagctctcagatctagacacctctgtccagaagacagtggctcctcagggacaggacatggcaagcatcgcaccagataatagaagcaaatctgaatctgatgctagttctttggattcaaagaccaaatgcccagtaaaaacccgaagttacactgagacagaaacagagagcagagagagggccgaggaacttgagttagaatcagaagaaggggccacaagaccaaagatacttacatcccgattgccagttaagagcagaagcactacatcttcctgcagggggggcacgagccccacaaaagaaagtaaggagcatttctttgacctttacagaaattccatagaattctttgaggagattagtgatgaggcttccaaattagtggataggctgacacagtcagagagggagcaggaaatagtttcagacgatgaaagtagtagtgccctggaagtatcagtaattgaaaatctgccacctgttgagaccgagcactcagttcctgaggacatctttgacacaaggcccatttgggatgagtctattgagactctgattgaacgcatccctgatgaaaatggccatgaccatgctgaaggtatttgccagccaccgggattccctgtgctacgcatgtcataaaattgatatagtttttttgtatgtttgttttatttgatgatttgtgtctcattttctttaagctttctgtagtggctaatgtgtttgtgtaagccctttgtgttttgtgctttctctgtatactcttgtctaagaaaacaatctcaagattgagtaatgagaatgcttatggaaaacataaacataataaccgggcaacagtgatcttgccttttttagcctctgcacgtaataaggccatgcgagctttgagttttgttgttctgaagtcccaagcttagactcaaattaagcacttttgcacataaatatattgtattttgtttcatagtatgaagacattgcttttcttcttatcttcgcatactttaaaataatttgtacttacaattttgtaatcattaggaagccatttgcttgagaagatttcacataacatgaaattctaattgttgtggatctgtttttgattcagaaaggttggatttcagataccattggtaaatactttaagcaaacaaacctaaggtaaaaatatgcttttcatttatgtggtagatgaatggagaatgtactctcattagatgcagcagacaacaaaaactcaaactttgcacagtttaagttgactgtgaggggatgatggctctttgacttataaaaaaggaaaccatagatggctttgaaaagtagcctgtgttcttccaatatctctacaatgaagactgtcattcttaaattgaggttatacaaactttcctataccatggtctaaaatgctgcctatcaatcagtgggagttaaacatgaatgggaaaattatagtttataggagtgagtagtatataagcttaatagcaagaaggcagaaactttgcccaaaagacatatatgcatacagatacaatatacacataaaaatgcatatgcttttatcctcgtttctccaaggtcaccaggaccaaatgttgtttctggccacactaatcaggatggcctgatcagctcatgatcaacatctcttgtgaatctctgatgtgattcctttcagacatgacctggaaatgatctatccctccacaagcaataataggaggtcctagccaattgctctacttctgcatcccatttatgatttctctggtgtttcatgaacaagatggtggtcttcttggtgggcagtattctctccaataatttaaaagtcataagattactagaaatcagcaacttatataattatgtctagaactagtcttgattaaagagatatggaagcagatggttttcatgattcatattagatctattccccattccaccccagaaatcagacacacaatatgatctgaaatgtagtatctagtttgtgctttcaaatatttggagaagtgacttcctttctttgaatgaatcagtactgtggttcctctcctgtcatagacaacctttggccattctgtttttgaccttctccagatccacaggatgagcaggaacggatcgaggaaaggctggcttatattgctgatcaccttggcttcagctggacaggtaaaaagaatgtgacccaggttttcaacaaaacctgacatagatgcatcagtcaggtgtcattcacagcataaaaggtaccccccactttcttgagaaagaatacatgaaaagaagaataaactaagaactagaaaacctgggctctgcatcagctaatggtatagcccagggcaggccttttatcatctctgaaatttagaataatagaactttctatttgaagatttagagaatataccaacattcaggaacctctgttggcagttgtggatatctaaatttgggggagattattatgtttcaaaatcatttttagatgtaatttttatcaaatttaatgtgagatttaaccagggctccttcttttagataccttatgtcaaaaatcttcatagtaaacaacactaaaaattgctttgggtaagtgttaaaacacacatgaatgagatatttcactaatatttttgagaaatgagagtgtttaagtatagaaattttatgttaataatttattaaggaaaagtgaattctaaaatcaatatactttatttacacattatgaattgtatgttttaaaaactatacattttcatctacttgtgacttaacctattaaagcaagattctcagtctggctttttttttttttttaatatcacttgtgactacttcaaagagacaaacattgtaaaataatattcttttcctttccatttcttagatttggtgatgaataggagcccataatactcataaagataactactaatttagagtacatgactggagaagtggccactttctcacttgtaataattttaaagtaattcttacatactgatcagacttaactaattcggggttttaggggagagaatgataccaaactatccgtgattgacttactagataacattcagaattatttattttggtttttaaatatgtttgtatccatacctacatagtaaatgcaatatgtatatatttggtaaaaattcaaatcctaccaccatatagaatgacatagaatgaaaagtaaatatgactctcacacctacttctatcttctagccgtgtgcctcagaagtaactgctaatactttctcatgcttttagaaaaaatatacagtgcctatatttatgcctgttatttaaaagtaagaaaagttttactgaataatattcctcataagtagtctgttaacatatacacatgtatttcattcttttaagtgggtatttaattccactatatggaggttccataattttattaatggcttttgttgatgggctttaggtggtttcccagtaacggcagtaaatattcttgtgcattggtatatttttgtgagtatatctatagggcatattcttagaagtagaattgctgcggaaaagatacgtatatttttaattttgaaagatattgtcaaattgccttcaaaagaggtcaccctatttacccacacacgcatacacacaccccataatgtataagcatccatatgtaatggttttttgtttgttattttgtttttgttttgttttgttttacagagacaggatcatgctctgctgcctaggccagagtgtagtggcacaatcatagctcactgtaacctcaaactcccaggctcaagtgatcctcctgccccagcctcctgagtagctaggacctcaggcaaacactaccatgcccagctaattttttaaaattattttttgtagaaatgaggtttttctatgttgctcaggctagtcttgagcttctggcctcaagcaatccctaccacctcagcctcctaaagttctaggattacaggcatgagctactgggcccacccaatccatatggaaggttaatagtagaattcaaaggaaaattttgtgtcttcttccctggatcaattaatgcttcctcgacctcttattcagttgacatcaaatcaaagaaaggcatttatccaaccaccataatatagctacaactagtatttatcaaagtatccagaaacaggatttataatactcaaaacatcacctatgttaattaaagggagaaactttttttcttttgttatcagtcatttattttccattatcttgcttaaaagtataagcaagtattaatgatctcatttgcattttggaatcaaatgggcctgaattatacatatcttatcattgctgcctcacacttactattttcactatgcagtgataaattctatacccagttttaggggaaaaaatccataattagtactagaagaacaaaggcatataagagtcacttctaatatgtagaaattaaggaactcaaatactcaccacaatataaagaacacatcatttacaaaatcacaaagcaaaatgtagagactgaaaccttgaagttaatgtgtttacaaagtagtattttatcttctagaattagcaagagaactggatttcactgaggagcaaattcatcaaattcgaattgaaaatcccaactctcttcaagaccagagtcatgcactgttgaagtactggctagagagggatgggaaacatgctacaggtaagtggggaactatatgcatattgggctaaagttggacatgtcttgctcaacaaccgcatcttgcaaattcagtagaatagtaaagaagcaaatgccattaatctgcagtacagtgggtccttgagtaatatcattttgttcagtgtcatttccttataacattgatgagaaaaaagaatcaattcccagcaaggccactgtctgtgtatagtttgtgtatcctccccatgtctgtgtagctttttccccagtattccagtttcctcccacatcccaaagatgtgcacatcagtttcactggtgtttctacattatcccattctgagtgagtgtgggtgtgtgtgagtgccccctgcaatgggatggcatcatctcccagcttggttcccatgcaaagtgctctgagctgctgggttaagttccagccacttgagaccctgaactgaataaggggattgggaaaagaatgaatgaattgatacaaattgttgtcaaatgaaaatgtatagagtccatggtaattacacaaatgcatgaaataaatgatgccttaggaaagtactcagcgagcccaccatatttgttattgtttgtttatgaatggcatggtgggaggaggtgctccttacaattttcactttgcaaagatttattccttgattgaaccccaccaccactatgaccgccatcacgcattggttcctcaaaaattgaataattatcttacttatgtttattagtctttcttaaatgtatgtgtaactcactttcacttcagtgtttaatattaaaagtgtttggggttttatttagaagtttggcagtgtttttgtgaccagaacattgttttctaagaatctatcaatgatgttgagtgagaacttagtgaactactgtaagcaaatgagaacaagctactgtcacttctgaagtatgcatgttgcttaaaaactcttgcacgatatgcgtatgaaccgcattaaataacagccctcacttctaacagtaatgttactcaaaccctaatatttttaaaatattgataagtggacacaattgctttacttagcattgtttcactggtagtgcattaccttctgtttctgcttcctttactcataaataacatccagtctacatttatcattccttgtctttacattcttctaagtagaattgtcagatttagcaaataaaaacagaagggtgcccagttaaatttaagtttcaggtggtcagcaaatacatttttagcataagcatatcccttgtaatatttggggcatatttatactaaagaagtatttgctttttatctgaaattcaggtatggtgggtgtcctgtatgttatctgacaattctacttttagggcttttgcccatgctgtaccactttttttatgcatatctcttttgtctgttggcttatttttacaaagacttttaattaggctttgattgtttttttctgtacagatatcaaaaatttagtaaggcagttgagtgaaagagatttttaagagtacctctcagacataataaatgctgtttctctaatgtgtcagataccaacctcgttgaatgtctcaccaagatcaaccgaatggatattgttcatctcatggagaccaacacagaacctctccaggagcgcatcagtcatagttatgcagaaattgaacagaccattacactggatcatagtgaaggtcaaactgtgtgtgtgtatgtgtgtgtgtgtgtgtgtgtgtgtgtgtgttgtgtctgtgtgtggttaattgaggcactggacctactgtcttttttttttttcagaaggtagaccatggcctatggtgatcatatgttcttttccttgctaccctgaggctttcctccctgttttacacaccctcccacctccgcttcatgctcattctttgttatttcacagataacaaaatgatccattgaattccttttcctcagttccatggtggcacttcttacacttgtatttttttatgctaccttagccacgtatttctaggctcacaactaggactatatcactaccagtgactgtacatttcctcttttacttctgcaccaacagtgcttcataccctcggggacctccagccattggccttaccaccttttcagtgttaaagttcccctaacctattctcattcatttgtggtctctaacactgtttttttttttctctctctctcttatctctattttacatgttgtcttcttccttcaaacctccaacactgtctcttttctttatttatacccagctgatgaccaaacttcctatttcttagaaaataataagaataatcagaagcaaatgtctatatttttccaccacgaatctaccaacatgagtgcatctcaatgcatatacttaactctaccttccatcctattaaaatggataaaatttcttcacttttctaaagccatcatctcttgttttgtactagatttcatctccttttactcaatcagggactccattcctgcaagtatcccttttggcttcctaccactagaccatacccaacagcattaaaccatgctttaatagatcccatctttaaaaacaaaacaaagcaaataactccttttaccctatatgtcccccctgtattattgctgttactccatccatttcacaggaaacctcttaaaagaacagtctgaatttcctgtctctacttcctctcttcccattccctctagagctctataattcactctagtcaatcttataaaattcacctattgtttcctctttttcaaatctagcaggcagttctcattcttcaacttactttgcctctgggtaacatttggcatgaatagtgaagcctgccttcttaaaacattttctttacttaaatttcatgacattcttgcttcctttttttttttttttttttttttaactttactggctgtttctccttcctgtggcaggttacttctcatggatgtgaatgatgatgtatcttaactgttgagcaagagcctcatagcttgtcctcatctcccacctctgtctctatcgcactggtcctgcacgcctggcctccttgccatttctggagcaccctctgcattctcctgtttcagggccctggtattttctgctccctccaccctagcatgttctttcctcagatcaacatatacctttttctctcactttatttaggtcactgctcaaatatcgcctcctaagcagagcctttcctgacaagtctatttaaaatactagccccatttatcctctacctttatcctggtttacttttctcccaatatttatcataaatatatatctgcagaaatgcaagttcagtggggacggaagctttttatatcttatatcttgttcactgctatatatccagcatctaagcagcacttattacatagttggtgctcaatatatatctgttgaataaatgagtcaatagatgaatgccagtcactcctctgctaaacatctttcaatgactcctcatttccctggatataatgaaattccttagcctgtcataaaagactctacataaaaagagtactatccttatagtgttagagtgagtattaatcaagttaatacttgcagtgcacttgaaacggtgcctaacatggaataaattttcagtatgtattagctattgtttgttatgatgattattaactgtactcatcttactcttcagattctgtgctttgactgtctcagtcaattcccacttgccattaggtctccttggcatgtaacacactctgcattttctttccaaattctaaccccatgttaggtgctcccacactcattgactggcacctatgacccagttgctctgcactggaattgaccgttacttgcgtggactcttctacatgatccgtatcttgaaggtggacacagtgtcttcttcatctttgtaatccatgggcccatctcaggatgtagcacatttatcttcttattttttttatcctcttatatttattacttaataaatatccattcaatataggtaagcttcaactaaatacttaaatcattctgcctttagggttctcggtacttcaagaggagttatgcactgcacagcacaagcagaaagaggagcaagctgtttctaaagaaagtgagacctgcgatcaccctcctatcgtctcagaggaagacatttctgttggttattccacttttcaggatggcgtccccaaaactgagggggacagctcagcaacagcactctttccccaaactcacaaggagcaagttcaacaggatttctcagggaaaatgcaagacctgcctgaagagtcatctctggaatatcagcaggaatatttgtgagtttccaaagaaagcctgtcaaatgtaataccaaagaaacaggctattgtggatgccaggcatatataagcataactagtttttaaatactttttaaaatgaccctaccaaacacaagtgccagagctaaaggggaaaaaaaaagcgttaacatgtaagagacataattgtgacagtgtttggggcacagacctacaagaaccaacttccagagctgtgactttgaacaagtccttatgtgctttgaatctccatttccacatctgtaaattatagtaataatacacacttgactcatctcacagggtcaaaagtgtgtttatgaaagcttcatctaaactgtaaaattccctgtagatgacacggccatgacttataatattgctgcacctcatttgctctgtagcacttcaaatatgctctgtagcacttcatcgtgccattgctggttaggagtatggtcagtgatgatgtagataccacagccaatggtgcatttcaaccaagctatgaggggactaatcataaaaatataaatgcaatgcaaactaaccacatagaataaaagactattaaaatgagttggaatagagttggggtgggagtaaagagaagccttccgaagagcttctggctgaaggaagctgcaggcctaatttggctcagaatttaagttccggcctttatggaagccaaggagaaagagttgtttaattgacactgattgtccagaaaagaaaacaaattgtgagaaaggccaacatatccctaaacctgaagtctgagaatagggtgtcatgagattgtatcaaaacatttcgcttgtcatttggtgagttttgtggtcattgacatgagaagaggatgaaatgagtaatgaaattatctcttcttccactgagccacccttgccccatcaacctgtaggttttaaagaaaatataaggaagaaggagaaggaccaaggaaaagatgggaagaagaggagaggataacagagagacattttaggcatttaatatctatggagtgatagattgcactgaataccaaaagaaggcacagaaaaggccaataatcttatttagcagttgaggttatcaaagttacattggagtaactccagactatatcaatgaaaaaagtttccatgtcaacagatgcctctattattaaataaaacagtttttcagaggtacaataagaatttccttgtatttatacttatgataactatattaacatggggatttatgtaattctgccaaatttttattcttgcttcaaaagccttattatctacaaatacttatgtaaaattcctcgcatcctcaatatcaccttgagttataaaagaaaagatgaaactataacttatatacattgtagaggttgggtaactgtaatacattttaggataatttttgtctttagaataataacatcactctctgccagtgctagatcaatgagctacaactctatatcttgtcatattatttttcttcaaatgtcctttcttggccaaatgtacaaaaactattttgactgtcatagactatggaaaaaccagctccatcttgcctttcgatttccttgcttgagcaggaggtgaaatgcaaatgtccctgaagtctcatttggctttttgattccagtgtgacaactccaggaacagaaacatcagagactcagaaggctatgatagtacccagctctcccagcaagacacctgaggaagttagcacccctgcagaggaggagaagctgtacctccagaccccaacatccagcgagcggggaggctctcccatcatacaagaacccgaagagccctcagagcacagagaggagagctctccgcggaaaaccagcctcgtaatagtggagtctgccgataaccagcctgagacctgtgaaagactcgatgaagatgcagcttttgaaaaggtaagacattcctctccactttctcgcccacctgtaacaaagctacaaatcttccagtttccatttctatgatggtttattttttgcacttcaaaacaaaaaagttaaccaaattaattaacctggcacatggaaaccctcaatcccttttaaaatctgagagccgatgaatcttgaagaaatggcgcacagttccagtgctgttgatttgaccatgagccctgatcttatcattggaaagtcttttgctaagaaaaatgaatacggtggtgaaacaatatatctggaggagcttttcaaaattagtaaacttgggcatgaaacctggtggcagagattagcagcaccaggtaagtcagccatgggatgtgctgggaccagcaggcttgttagatctctggcctgccaggtgatgagcacacagactgtggatattgggtggggtttagctgccaaaataaatttttctcattagaggcaagatgatttccaagttagatttttttttttaagatttattttaggaatgactgagaaaaagaacattgtacctaaattaaatgtccaaatgcctgacggtggcataagattgcatcatagcgcttcctttgtcattaagtgagttttaaaattgtgaaaaggggtggggaccatgttaagaaattaaccattggccaggcgcggtggctcacacctgtaatcccagcactttgggaggctgaggcgggtggatcatgaggtcaggagatcgagaccatcctggctaacatggtgaaacctcgtctctactacaaatacaaaaaaattagccaggtatggtggcgagtgcctgtagtcccagctactccggaggctgaggcaggagaatggcatgaacccgggaagcggagcttgcagtgagccaagatcataccactgcactccagcctgggcgacagagcaagactgtctcaaaaaaagaaaaaaagaaattgatcaacaatttattctcaaaatgtggtctatatagttcacatacgtcagaattgattggagagcttgatccctcctcagaaatcctgaattagaatgaatcccagggtggggagggaaagcaagaatttgccttttaaataactccccagaggattctcagccacaaaaaaagtatgagaatctgtttgaattaaacttaatttaatatgaattaaacttaatttaatataaattaaattagatattgttttttcttttaaaaagtaatagaattcaaaaacactttatatttcaaagtgtttttagagcattaatataaagcttagtagtaaaagaagagttaaacaaaataattgaaattttggggggcaaataaagtgaaacagcatgtgtttgggcttaagacacacatttgtttttgttcactgtaagaatgagatctgctgctaggaattatctgaaatcacaactaaaattaggaaagatccaggcagatgagaactgtgtcctgattttggcagttttcttaaataataaattcatgccatgaatgaatttttattccaagtttgcttttgcatagaattattcatctctcaaattcttggcttgaatgagtactactaaaaatgtttcttacatgttatctaggctaaaagttaccaaatttaacctaagaatccataggcttagtgaagttagacttgaaacaattatctggataatacatatgtttaatctatactaaaggaatatgtttgtataagtcactctgaatttcacataatttatacaggcctgttcgacttattcttgatgagtatcaggcatttctcttaagcttcccatgtggacccttatttctcataaccctaacttgggcatccaattttaatcacttttcttgccaaccatatttctaggcagtagattcctgattatatttaaaatataatttggtttagaatttacaggtcttcctttagcagagacaaatgtaaacatataacttgagttttacagtgtgttaagtaaatctacttgagctttctcttttttaaaaacaaaatttcattagggaagagtaattcaatatatgactcctaaggtaatgtgtgctaagctaaaattatgttttttgctttatctctggcttttggccagagccctaaaatactattgaccactttatctcaacttctccatagaattattctaatattattcatagtctacctttttttgatgccagggagatgcactattggttagataatagctacaggaaactttgacttcctgcaaaaagttctgctagaaacaggggatattcctatacctttgggtgaataattccaagcctaagcaccagtgtcagtggctcataagtgtttactgaactgcttagggtctatgtttacagtcaggctttttttttaggagtttaagtaaaagaagtcacatgagcaagctgctttttattttggagagattttgacagatgggttctccaacagctctcagaattccagaattttttttcattcattgaacaacaacaacaaaaaaccaaaacactctatttttgttgatgtctgagaccagcacgtatttgttttcacctctaccaacttgtccatcaaagcctccatgaataaaagtttcacaatacaatgtaagctaaagaagaaaccagtagtgaagtcattccttagcatgttaaacaaagcaatgcttccatgcttccaccaggagctaacagaggaattaggggagctggaggccagctcagatgaggaggcgatggtaactaccagggttgtccgccggcgagtgattattcaggtacccactgttaaattactgcacgtcagggacagtcctgtccccatattctaagagtgatcaacctggatcaatgaaggcttggcatgttccttaggtagtgcatggccattcaaaagcagatcccttaactctcataagttctgtttgcaaacaaatgcagtggttccagctttcctccaggagagccaccaagcaagagcaagacttggcttcttcacttccacccacctcacctctcgcttttctatttttgttgaagttttatctaactttggtcagattctcctaagcatgttattacccacttgagtttttcactagttgacaggattttgtatctcagcaatgcttctcaacatcgcctttgattttctaacattcctcacattataagcacttgggagtagttcctcagaattggtgccaaacaccacagtgacccttttctctcaactgtttagggagacgatatgcctgaaatacccccagaaacagtcacagaagaagaatacattgatgagcatggacacaccgtggtaaagaaggtattgtctagtatatcctaacagggttgattacaaacttcctgtttaaaatttatcaattccatggtactgtcacacaaaaataagatacacaaatgaaatacatttcaggttactaggaaaatcattaggcggtatgtatcctctgaaggcacagagaaagaagagattatggtgcagggaatgccacaggaacctgtcaacatcgaggaaggggatggctattccaaagttataaagcgtgttgtattgaagagtgacaccgagcagtcagaggtgagacaacctgattctctaaaacccatttgatggagaggaacaaaatagagctcaagaaagatgagtgagattgtttattcatattttcctcacttctccctttcatgtggcagtttgctcttagttgcacattcacctttttgttttcatgattctatgtgattttaagacagccatcagggagacttgtaggcattatactcattgtttttgtttggtctttttaaaaatatctattctttatttaattcatggttgaccactgcagaaatccaaaagtcaaattttgaaagaatacaattctatttgctgggcaagcagtatgctgtggagacaccgtgtagaaacgcactgtggtgcttgtgcctggttggcacaccagccttcagaaagtcactctagataaatatttgatattcagatttctgcattgcagagttactaaaatcaggatcgagaaactctttgatttatccttgttttttgttttaagacagagtctcactctgtcacccaggctggagagcagtggcgtgatctgagctcactgcaacctccacctccgggttcaagcaattctcctgcttcagcctcccgagtagctgggattacaggcacccaccaccacacctggctaatttttgtatttttagtagaaacagcatttcaccatgttgggcaggctggtctcgaactcctgacctcaaatgatccacccgcctcagcctcccaaagtactaggattacaggcatgagccactgcacctggcaatctatactttaatttatttctgttttacttccctttttcagggacatatttacttgttttgacaaatagtttgtgaaattctattttccattcattcacatcctcaaaattttatattatacacatgagattctctagaaatctacttttcagtttctcatagcttttagagctcctcctttgagggctaatttcatctttgtaataccaaaagaaattatttaaacatgagaaaagagagtttcttcacatattattatgtctgtattacactgagcagtttcttattcacaaaactgataactttttgttcaaatgactaattaagattgctttggtgttgtggagatacagtcatgatgtagatattaccaataggttatagttcgtttttttctaactctgcttcccattgctgttttctggaaagccagtatgtaactttatagttttgtcctttgttttttaacatagaaaaaattcatcatagttacatttggcaatcagacattgtctattgtgtgtccttcgatcattaggtcactttgtgtgagcccagcattttgtccagtacctcacaatttcaggctgagccagtggaaggccgtagagtcagcaaagttgttaaaacaactgtggtacttggagagaggatggagaaacatctgggggattctagtttagccactgatcttccttcagccaaagatgactttgaagaggtatagaagcatcatcatttgtctttttatgtgtgtgttttatgttgctttgcatttgaaaagaaaatcgtttgtcattgtatcattctatacatgaattcatggaaaggtgcagaataattcaagagggtagaactcctgtttgaataacttgcagagtaacgtttccttaaactgtggtgttcattggtgtcaccttaacagcttttaaaaatccaggtaactaggatttgcttctgctgaatcagactcagaatctctggagctggtatatgattatacatcttgtttaaaagtcacagaagtgtcttgctttgtcaattaataagggaaagaaataaagacattgcaaattatatttgctagccagtcttttcaaatataatctgtgatagacattaaagaaaattcagatatattccatgtccataaattttaaaagcatttacaattacttaagttctggtttccaacaattagaaaatgggtccacggttggccaggcacagtggctcacacctgtaatcccagcactttgggaggccgaggcaggcggatcacaaggtcaggagatcgagaccatcctggctaacacggtgaaaccctgtctctactaaaaatacaaaaaattagccaggcgtggtggcgggtgcctgtagtcccagctactcgggaggctgaggcaggagaatggtgtgaacctgggaggcggagcttgcagtgagccgagattgcaccactgccctccagcctgggcaacagagcgagaattcgtctcaaaaaaaaaaaagaaaaaaaagaaaaagaaaatgggtccacagtaacagatccacaaactcttactaaaatccccaaatgctgaaaaccaaaacaaattttgtaagttaatttggaagtgaaacttgaaataaattggcatggagctattatgacatgaagcttttttattctacctagagtgaatgttttagtgacataaaaatgggtttgattacaggatgccatcttcgctctggagtattagtattatatagtacagtcatgcattgcttaacccacttatgccagaggttgccatttttaaaatttttgcatgagtgaaaaatcagaccttggtgatgaccttgagcagtaggatataaataacttccacatgcctagtgttcactaggcataagtgggttttaatgacagggatatgtgctgggaaatgcatcattagacaactttgtcattgtgtgaacattgtagaatgtccttacacaaacctaggtggtatagcctactatacttctaggttatatggtataacctattgctcctggctacaaacctgcacagcatgttactgtgctgaatactgtaggcaattataacacaatggtaagtatttccctatctaaaaatagaaaaggtacagtagataaacaaaataaaagattaaaaatgttctacctgtatagcatacttaccatgtagcttgcaggactggaggttgctctgggagagtcagtgagtgagtggtgagagaatgtgaaagcctaggacgttattatacactacagtagactttataaacactgtacacttaggctatgttacatttgtttaaattttcctttaatttttttaaatcttccttctgcaataataaattaactttagcttactgtaactctttgactttataagcttttacatttattttaacttttgactcttttgtaataacacaagttaagatgcaaacacattgcacaggtgcattaaaaattgtttttcttcatatccttgttctataaacttttttctgcttttaattttttaaatttattatttgtttttactttttaaggtttttttttttttttttttggctaaaaacaaaggcctaagcatgtacattagcctaggcctacacaaggtcagaataatcaatatcactgtcttcctcctccacatattgtcccactggaaggtattcaggagcaataacatatggagttgtcatatcctaagaaaacaatgccttattctgcaatacctcctgaaggacctgcctgaggctccttgataattaactgttttttaataagtaaaagagtacactctaaaatagtgataaaaagtatcacttttataatacttgataatgataataagtgactgttactgatttatgtatttactatacatagtaaatgtatttaccgtacataaaccagtaacatagtcatttattatcattatcaagtattatgtaccctacataattgtatgtgctgtgcttttatatgattggcaccttagtaggtttatttacaccagcatcgccacaaacatctgagtaatacattgcaccatgaagttagaacagctatagcatcactaggtgacaggaattttttagctccattataatcttatgggaccatgtcatatatgcagtccatttttaaccaaaatgtcattatgtagcatgtgactgtatatgcattatattaccttgctaaaatccaaaagggacaaaaaaatctaaattttgaaacacatctggtcccaaagttttgactaagggatcctgggcatgtgcaaacatctacaaagtacttttgctattggaacattttgacactaaatgctgtatgtgtgtcctctactatacccataatatatattgaaattatatatgaattcattggaatattaaaagcaaacctcttaaaatactttcagttttcacattttgacaactggcaatcttgaatggtcaaaaatgaattatctgtgttataccatttgggccttgtttgcttgtttttgcctctggttcttacatttatcattaaaatctccactgtagaaagcagttgggtgaagcaaggaggaaattgaaagtcaatccatatggatgttgcttagcagcttttgtaaagtacaataacaaatctccctcacaaatgagagaaactaaaaggacttgttaaataaaactccaaacttaagtctgcttctaggaattgtatttatttatcgtttcaagtatatcttttcatactgactatgagtaaagcaaagcaatagattgtttgaaagtctatagtttatgatgagctttgtcttttcttttcttcttacttcaggctttgagttacacaggtagccacatgaaagtccacttacccagtttagtagagaatgaaatcctgaaagaggatggatcaataattaaaaggtttgggttagcatggggtgatgctttgccaactaacaccataaaaatttttccaattttaagaaaagaaggggagaatccctacatctaccctaaagaggatagaaaactgcctactctcctgtattataatactttggtcaagtaatggatctattgaagtatcatccctgaagtatcctcttgatacttcaaacataatactaagtcatagcaagaatgagactcacgcttacacagtctgactccctgggttttagcaagccatcaacttagttgaagccagcctgatggtattacattgtgtcgatagattcagagagcataggaagaagaatctaatcgatggatcacagattaattttgtgaccagctatattcagctcaatcttagtaaatcattactttgaatggtatgtgctttcttttaacagctgctttatgattctgcatgtgagtggccaataacataagcatgagtttgatatccatgaaacaaatatacctagcgatgctgaaacctggggctttaatgagttaagcaagtgtcatgaaagcagtaagcagcacatttttacgcttatacaagggggctgactgtgaggcacactggtctgcccaggtctctgttatggatttgatgtataaacttgggcactgttccacagatctactctggcttctcactggtcctctaacagcactgtaagtattgagattaataaaatgtgctcagcttctcggtgaaaagacacaatggaaatccaagttacaattgtgcttctcacttcattgaaaagggagaaagattgtcattcagagtatgctacagaactattttaagcctttagaacataataattagaacagcaaaattaaaggttctgtcacaattccacccaccaatcaaatgggaaaagagcagcagctaggaatttaaaagagtgtaattgctctctcagaacttaaaaaatgctacatgaattaaggataaaatgccttttatactctcaacttttaagtcttttattcaattattcagatgaaaccacataatccacgcatgcactaacatcatgggctcttcaaacaggaatagatttagagatcaattaatccaaagttctcaattacagctggtgaatttgaagccaggaatatagacaactccatagagtttccacagctagttagttatggaagctagttagttacagaactctatttatgatgtacaacatttattttatacattgttaaagatatcatatacatgtgcatattcagaaacacattggcctacatttgcctacacagaatatcacgaaatgtcctataatggaggcttaacccctggcatcaatgctataaaggcttctactagcttttagcagaaatagtcagaaaagtgcctttttgaagaaaaaaaaaatggctgccgcgtatttaggaaaacatcagatttcaatcattggaatcaaatttgaccttttcatcagcaagaacaaatttaagtttgcttccagatgcagaacaattcatatagtattaaaggaaaaaggggagtagaagaacataagggaagaaggaagaaggaaacaaggatgtccaaaaaaaagctgaaagtattttagctgaagtaagttatttttaaaaatcaggatgatcgtaacaaatgcatagaggtattggatgatggcagaacttccaacttctgaacaatgaaaacataaggaaaatgctgggtaaagctacaaaaactgatcatttcctatggcggttttaagtgtagatgcatagtgtatggttatggactcaggctctggaatctttgactcttggtcccactgtgtgctaattctgttattttttgtttggactattgcttaaattctcggagattcaatttctttatttgttatactagtgtctggcccatacaacacattcgtcaaatacttgtggaatgaggacccgcatttggaagtgtatagtgaaaaaggctgctctgcctatggagtagccattttttattcctttgctttcctaataaacttgcttttactttactctaaaaaaaaaaagaagaatatatagtgaaaagaattgagaatgagcaaattacttttaagtacagttacaggaaaatattagtatgacttaaaattaatatgactatacaaaagttatagctcctggcccaatgtggtggctcacacctgtaatcccaacactttgggaggccaaggtggacagatcatctgagctcaggagttcgagaccagcttggccaacatgacaaaaccctgtctctactaaagataccaaaaattagctgggtgtggtggcacacacctgtagtcccagctactcaggaggctgaggccagagaatcgcttgaacccgggaggcagaggttgcagtgagccaagatcgcaccaatgcactccagcctgggtgacagaacgagactccgtctcaagaaaaggtgttatagttccttttctcaagtaaccaccagtcttataagggaggcaagtaaacaacagactgttaaatggcaagaaatacacaaaatgagcaacatatgtgaggcttggagaatccggaggaagcagttgtctctcaatggcttttctcttttccccttcctcccccaccatctccatatgaagccttagagacctgggcagatcttcatcttttgttgggagccaccttcttatatattgatagactaatattttagtttttaaagacatatgcctcataaaaaacttctctgaaaacataattttgggaagtttgggtcagggtatgactgtaaggtttaagctggcagccaaggtgtttcaaataaattaaaaaaaggtttttttagcctgtcaaaaggtacttgtggtactatttcagaattaaccaaactctattaagtaagggctacttaatcaaaccatgaatgattttatggttagtttttgagaagatcaaattaaagcatggtttcatttattttaaatttttcttaaagatttaaaaaatactccttgttccaaaacacattttaaaaaaatctcatgaatcgtttgagagaggggagccatgtttaaaagaaagacacaaaaagatgtctatagtttgttatgctaatagtttgctgtggaaacatctaaaggtaagacattaggtactcagtgtaatggtcaccttcattcctaacagctgccctctggcagtgaaaagagcgtaattctctcttgtctgcttttctccaggacaacaatgagtaaagccatcacacagaagagggctgtggtgaaggaccagcatggaaaacgcattgacttggagcacctggaggatgtaccagaagcactagaccaggacgacctccagcgcgatctccagcagctccttcggcatttctgcaaggaggacttgaagcaagaggccaagtgaggggctgcccagttctcacaccagaaaccacacattcactcaatatgcagcttcctgtttcagtaggggagtgacctaactggcctaattaatgggataccccgacatttccactgttagcaaatatacggcattttgctttagttttcccccatcctctttaactataaagctaatttgtgaccaaagatggcatccttcatactggatgctgtatccaatactttgttgtgtctgtgctaacctgggaactggccacctccattgttctttgcttctgcacaagatccatgaaaatccattgatcagaagaacttcacctgcagacctcttcaagtgacactatgtaggaatccttccaaggaatatctatgtacaatgtatatagctgaaatgctcagatgaacaacatattaaaattaaaaccactgcctattgtaactacactgggcatcagaataaaaggcctctagaaattgctgaacaatggttaattaagatattgctaacacaatcgagtgataatacagttttactgcaaaagaagcacttcaaacctattatgtccttagaacttccagagtagccactgctcccagttaaaggtgggtcagtagccttgcagaactgtcctgagaagttattgctggtgctggccagccatggcttaggactccaacagccactctgagggaggggagaagggagcagaggccacgcagaatgaaccgatggggtattcagttgctggcagctacattgtgtggcattctagcatcttcaggtctttagatcttggacaagttggcagggtattttaaaagctataactactgtagttttccagttttcattgctgctttagcaaaccacgctgtcttacagtggtactttcttctggccactgcactgtagataattcattggaaacaagatttacccactacataaaaggttaaactccttcagtatgttggagtggtttctttttttttttctttctttcttttttttcttcaggtttatatcttctctaatacctgcatgtggcgtttaaaaatcaagaccacggtcaaacccctcttctaatcacattaattgtttccattctttttaccctgagtgagcacttttcactttccagctaggtctgtttttcagcttgcagacaagattgagaaatccttgaaaatttggttttggttaaaatttttggtttatttatttgaaatccacactcccttggaaactcttaagtgcatttgtgcacttctgtttgtttgtctcaaagaagggactgtaacaatctgagtaatttccatgtcctcttccttattcctctagtggttgaagctgtgtagcattttaacatatatatattcacaaatatattcatataaacagtatacattttgaatcagtcatttgttaaagaaaagtatattcaatgaagatgaaatttaaataaaaaaggacagagtctatcctccagggattgaacattttccaattatctggtcttttcctgttgtgcaaaaatgactcattgctccgaatgtcaaaaacaaatgcgacaaacaatggcacttcatcatttaaagtaatgttgccaagagaaaaaatttcctgggagggaggtttcccacaagccaaatctcctaagcctcaaatgctagcactttttggcagttggataggaaatgagacattctttggcagccaaaataagagaggccgatggtgaaactttttgagacaccctatggccttcttgtcaaaaccttcactggagctcaagaaaagcatttctgttgtgttatttgcagtgcagatgatgtctgtgtaacaacataatggttattcacctttttttgattttgatttttgctgtgttatcaaaaacttgaatactgtgagaagaagtgaattttcagttgacgaatcagcatcttgttcccatggtgataacactaattgaatatatctatgagggcatgtattagttaatggaaaaaaaaatacaacactaacaatacatagctgcaatgtgtacaatggctgatttaattaaataaaatgtacaagtgttaaatgtggcaacggtgatttgttcttctttatcatgaatctgtgatttcaggagaataagaggttttaaaaagttgagctagacttgaaaccaacagaaagacacaaattgctttttttcttatggtttttatttagtcgctgaatatgctatatgcctggcactggattaagcactgggataaatagattttgcctctgccctcaagaaattcttattgttcttgttatgcaaaagaagaaaatgaggatttttgttttggatcactactaaatgaaagaaaataggaatttggggacttgcaggggatgagaaagggtaagtgggattggcagcacagcaagactggtttggttctctcccatgaggccatggctgtcactaaatactttctgtctttgggaacagcagttggctctggagttttctttctgtcttagagcctgagaatttaaaattaaatggatatattaatataaataaagacagggtaggactatggaaaatcaaaatcagttgtgtgtggagagttttgtttcattttttgaaaaatccctttactgttgctttaatattttttacagtaaaaacaaaacaaaaaagacatgatttagaaattgagtaggttttatttaaatcttatctggtatgagacaggaagctcactggatctgatttctatccttggttgatttacaggtcttctgaacttaaaataccaattatgcttgacatttttcaaagaaaacagttaaaaataattccaaagtaggagtgtctgtgtgatcatctctctccttctcatttgtttaatgtgctgtactttctacttacaggaactctgggcttgtgttactttgggtttgattaaggaaatcaaagcatcagagaagattcaatgtcttctcatgtttaattatttgctgtgcaaaacccatttttgtaaaagaacttcagtgagtcatatgccgttttacagaagtatatttaaaggtagggtgggggaaacttccagactgagagaagattatgcaccactcataaatcatttgtattagtcatgaagaggtgaaagtgacatataagcactcggaaacaggcttgaattgaatttgaaattagtttgctcgtggagtcacttgatttctgtaagcatggagagtctgggtgtgggcaagtagtcaggcaaatgaataaatcagataaagagaagttaaacgtaggtctagtgagaaccaaaatcactacgaggttctcctgaataacagaataaaaatgaactgcttgctttcatcatgctctaaaagaaaatatttcaaagtctatgtctttggttgccacctctgcttaaaaactatatgctccttccttcatttaaggtatcatttctctttctaatctaattgaagctagaattacaatcatagactgaatcaccaaagtaagaaaatcttttagatatctgtgcggtggggatggagggggcgatgtcctgaacacaaattaaaata

SEQ ID NO: 26 - DNA, 39197 bp, Homo sapiens
  source 1..39197: mol_type = genomic DNA
gttggagtgcggtgccacagtctcggctcactacaacctccgctttccaggctcaagcgattctcatgtctcagcctcccaagtggctcgttctacaggtgtgcgtcactgcacctggctcatttttgcatttgtggtagagatgggtttcactatgctggctagactggtctcgagctcctggcctcaagtgatccgcccacctcggcatcccaaagcacatgagccactgtgcctggtagacttcccttctaaaatacctgctgttcaaagtggttcttccttaaatggccttttccagtcttctgcatgtgggacggacgtagattagcaaagtgaggatggctcccggtttggctggtagctggtgggggtctaatttctgaatgctggactcagggcaggtatggcgggggagaaggcagggaggggcaggcaggagactggggagtggggagctgacccataccagggcagcccccagggatcttcagtgtgcatgttgtgaacgcctgcgtggagggagccgcatgaggggaaggctgagggtgtctggactgggtgagttacaggggcccagcgacgtcaacgatggaaaccgtcccctggtttgggacagactgaagacttctcacatgttagtaacgatagcctctgtctggccaaagtgaaaactgcacaccagaagcctcaatgagactggtgggaaaggcaatgccaccagatggcggccagctgccaggggtcgccatgccgacgtttatcccaaagccttttctaaggagggagcacgggcgggaatctgcagctggagcagtcacagggtttccaaccacgacaaacacgcctgcaccccgcacgcacagccgggccccaatgagggtttccatcagcccttccctgggaaaactctgcaggcttctggaaacatccacacggctctggaggacctggctgtggtccctgccatggcgccgctggcactcccacggctggtacgcagcaccatggctgcttttacccagaaacgagcagcagactcaccgggcgcctccctcacagctgccaccacgctggagaagggcactttccaaccaaagccaccacagcaactgttaatgtcaccaaggtttcccactgccaagagcaacggtaaaatctgtgctcttttaacggatgccagaaaatctttcacaactgagtcaagaaaggggcttaaaaacagcgagcgaatctgagggcacccaggttgatggccgtccaaccaaaacagtgccgtgcgcctgggcacaagtgagggatccttccgaaagcttgcaattattaccacgcggttttgaagtaattcatttcattaagtgttttgtgaaggacataaccccccgggacacacgagaatgcctccgttgggactggaatcgctgcccacaaacaaacggagaaacagtcaaaggtggcctaagacctgggaaatcaggagcagtggtccacatacaaaatcagggccaaaacgttttactttccatttgaatttacaaccatatacagacaatatggtaagattttagagaaaacagatcatcactacgaatatccatattctgatttcttttgagaaccaaggtgccttttaaaatgcggctttttagaatagcatgtgttgtttctgtctgggatctagatcttgtctgctacaaaacaaatgaacacaccctgtgtaacaaaatcgaattttaacatttaaatcttgattccaatattcctgacctatctcttgtcatatgaaagaaagaagcctttttttaaaacaaagtttcaattcagaatttttacaaacaaaaacaatcctgcgtctacttaatatccctgtatatcctcaaaaagcaagttcaggaaatttaaaaatgatttataaaaggcactgaagttagcaaaagcattggtgggttttcattttggattaaacactggaaatgttcacagagaaacaactgtgtgagcagttgcccgtaacacccaggaagaaaccgacctccaggcagcacctcctgaacacctcagcggctcctcacacattccaaccacagaccttcattcaagtcaaggtgaaggctacagtcagcacggcaagaaaccaagatgggactcaaacctctaaatgcaacactctgcatacaggagatcccaactgaaatgagttccaaaataacggatacctttatcgtataatcatttatgctcaacaaagcctcaggataaatttgaaaacagaacaatgtatagactgtattactgctgcactggctcctgaatgaagcaggcggtgaaggctcacgtgctgaggaaacagggaacaccttggcgccgctgctgagctctgtgttgctcctggtatcactcccacgggctgcaagacttcccaagagaaaagctactttcatcttctgatcagtaatttaaatattccgaacaacccaaatcacaatggttgctgcaagtctgaggcgcgctcctggctccctgatccctgccgtccacctccctctgtctgaaccatgagacccacgggcgaaccaacaggcactctgccaccatcagatgccaccccccaacccaggaaaagacagggcggcaaatagttcatcttggtgagtgcaggttatcaaagggacatcggtgctcacgcctccgccaagcccctcctcatccacagcgtctgtcggatgaggtgagtacagggtaagtacagggctgcctgcctgcaactgcctcagcgccctttcctctgctatatttcagacctagaaattgccacctaaaaagtctaccattaccacatggatattttccagaaaattggtaactgagtttgctttcattaacttctaacttcttccaaaatatcagaaatctaagtgttatatagaacatttaaatcttctaaaattctcacaccctcaaagtgaggagtaataatttaatcagaatatattcctttttgacagtttagcaataaacatatgacccttccttctttaaaaatgaagaacaaaccgagagcccagcgccaagcctacagggcggcaagctcagccaggcgcgccatcctgcggagctggctcccgtgcacggggctgtagcgcccaggactgcccaggcctggctttgcggggttgcttccagccacgctgtttctccccggactgtagctgtgagggccactgagatctggcagctgagacttgaaccttcctttcaccgcgggactgggccaactgcggaaagcaagaaagaactgttagcagacgggcacaggcccggagatgaacagcaaaagtcggagaataatggccccagactcaggcacatgcgcccgggcggaggagaggcactggtgaaccctggcaccgcgggcacacacgcccgggtggaagagacgcactgctgaaccctggcaccgcgggcacacgcgcccgggcggaggagacacactgctgaaccctggcaccgtgggcacatgcgtctgggtggaggagaggcactgctgaaccctggcaccgcgggcactgggagagtcaagctcatgggggtttcccggagaatcctgtgtgatctgagtagaaaccctgctgcttccacccttctagccctcagcttgtcaggagctgacccgttcagcttttccacccaaccagagctctgtcctgtgtgcagagagccacaacacccaaatccacagcctggctgacgggcctgccagcgttgggaaaagccactgataggttcgcatgaagtggaactggaccctgcagaagtttccaaaagctgccctgcgggtgacaggctgtccgggccccacatacctctgtctgtccgagggtgagtagcacaggacagcactcttccatctgtgcacggccgggaactgatgggggtcgacgtctgcacattcaagagcggccaaaacatcctgatcgagttttgatggctcctctctagaaagcacaataaaagaagcaaaaacatctttggtaaaaacataaagacttctaaaataccactacttttttttttattttgagacggagtcttgctctgtcgcccaggctggaatgcagtggcgtgatctcggctcatcgcaagctccgcctcccgggttcaagcaattctctgcctcagcctcccgagtagctgggactacaggtgcctgccaccacgcccggctaattttttgtatttttattagagataggatttcaccatcttggtcaggctggtcttgaactcctgaccttgtgatccacccacctcggcctcccaaagtgctggaattacaggcgtgagccaccacacccagacaaatatcactacattttaaactcaagaacccagcacacaaaacaacagtgtgcaaggatcgatctggcctgagcagatggaaccagggaaccagcagcagcatgtcagggcattagctctgcagagggaggcatctcccaaggccagggaggcggatgcagactcgctgttctgtgatgagaagagcaggggccagggaggagtcgcctctgggtgcacgcctgcattctctatggtagcaggatccacccgctgttaaaatgcagttttgcatacttgcacccccagagggtgctcagtaccagaaggttagggacatttatcccctgttagattgagattgaccccaagatggcttttcttcctagaaggatttagaagagatcattcacaccactggcaggcacatccctagcaaataacagccaacactaggatcacccacggtccaaccagaggaagacccagaaagagcatctagaagctggactcagagacaggaactgaacgcacacggcaagtccacacaaaagcttgtgtggaggccgggtgcggtggctcacgcctgtgatcccaacactttgggaggccgaggcaggtggatcacgaggtcaggagttcgacaccagcctggccaatatggcgaaaccccatctctactaaaaatacaaaaatcagctagacgtggtggcaggcgcctgtaatcccagctactcaggaggctgaggcaggagaattggttgaacctgggaggtggaggttacagtgagctgtgatcgcaccactgcactccagcctaggcgacagagcaagactccatctgaaagaaaggagaggagaggagagtcgaggggatggggtggggggataggggagggggaggtgagggggagatgaggggaggggtaggggagggggagatgaggggaatgggagggtgggaggggagggggaggggaggggaaggtgagaggagggggaggggaggcaaggggagggggaggtgagggaagggggagggggaggtgagggaagggggagatgaggggagtggatgggtgggaggggaaggggagggggaggtgaggggagggggaggggggagggaaggtggggaaggaaagtgagtgcagagggcaacacactcctacccaaaaaggaagagccgcctggccggttccctggtgacctcgagctgatcctcgtgcctggggctgctgggactcaaggacattttagcgatcctggctgacatttcactttctgtcctcctgtggccattcccgagttggtctgcgggagaaggctctaacaagtctctttctactgcattgattcttgaagtcaggatctgatctttagtttttgtactttcatctggtgtcttggaaacgctacgtcctatattttgcaaattcagtttatcaaactcaacagtcaaatccgagacaggtggcagatgggcttcctccccacggggggcctttggtctcttgcccgccagggtcctgctgtgattcagaggatggcagagcccatttctgctgctgtgtggacctcccggctcggcggcttctatgaggtctgcctcctgctccaaggggaaggcgctgcacctcgtatgtccaaaagcaccgactgtgggcgggctgttatttcgagctgcattttgccgattttttatttcttccaagctcatgtcatcttcatctagaaacgccctcacggaaatggaattgctgcctgtgaggacaacaaggagcacttcagtgatgggaacgacaggaagccacggagctgctccgccccatccatgaccaactgccgtgaccccagcaacagcaactcttatacccaaaacctccccactccatccgcgaccaactgccgtgaccccagcaacagcaactcttgcatccaaaacctcctcatcagatttcaggatggaaaaccacccacacgactccctggaaaagggcaaacaggaccctccagacacaatcaggctgctggggccaggcacagaagctcacgcctgcaatcccagcactctgggaggccatggcaggggggtcgctggaccccaggagttcaagactgcctgggcaacatagcgaaaccccgttctctatagaaaaattagctgacatggtggcacgcacctgtagtctcagctatttgggaggctcaagtgggaggatcgcttgagcccaggagggggaggctgcagtgggctgtgactgcaccattgctttccatcctgtgccacagagtgagaccctatttcagacgaggagggaaataaagctgccaggctgacttttctttcaaaggcagggacatgaaaacgccaagggcagcccaggtgatgggcgagatgactgccctgcacccccagccaccctccagctccgatctgctgcgaccccaggggctccgagtgtcacagtgccccagaggatcccgaagatcgtccagaacaactccatgaagtaaccctgctgcgctttaggtgtgaagataacacagaagagctcccgggcgcagcactgtgcgacaggcaacagaaatgtcccgtttggtgttcacgatggtggccgcggccacaggaggatccagaacacttgagctgtggctcctgctacttaggaaatgcctcaactttatttaatatttactaattaaaatgtacatagtcacaagacaacactgtaaatgaggccgctttacagaagtgagttctgtgccaccatcagctacaacacagcaaggtcagacttcaatgattcctgtataacgacggcactgacgtcgctctagttctgtggttcagagtcacaggtcgtgactgttgaagattcactgcttcttagtttaatgtatgtcaatcattttcattttctatcattccagggagtttgttttataaatgaagtgtcttgcgggctaatggttctattatgaccttacacacacaaactcacacagacacacactcacacacacacacacacagtttaaactgtatatctgctttaatttgtattttagcagattcgaatctctagttattagcaaatttctgtttttttaaaaaaataaatagagacagagtctcactatgttgctcaagctgccttcgaactcctgggtttcagcaatccacccacgttggcctccctaagtgctgggattatagtgtgagccgccacgcccggccgctgggattgcaggcctgagctcccgtgcccggccatcgttgatgtttttatgaatcacttttagattttgtagattaacctcttccatcatgctctttccattcagtgcatctgtgctttggaagcactttgcatcgtggtgtctgatatgcaccgtgtgaagtgctttgcgtgtgcgtcctggtgtctgatatacaccgtgtgaagcgctctgcgtcctggtgtctcatatgcaccgtgtgaagcgctctgcgtcctggtgtctgatatgcaccgtgtgaagctctctgcatgctggtgtctgatgtgcaccgtgtgaagcgctttgcgtttgcgtcctggtgtctgatatacaccatgtgaagcgctctgcgtcctggtgtctgatatacaccgtgtgaagcgctctgcatcctggtgtctgatacgcaccgtgtgaagcgctctgcgtcctggtgtctgatacgcaccgtgtgaagtgctctgcatcctggtgtctgatacgcaccgtgtgaagcgctctgcatcctggtgtctgatacgcaccgtgtgaagctctctgcgtcctggtgtctgatacgcaccgtgtgaagctctctgcgtcctggtgtctgatacgcactgtgaagcgctctgcgtgctggtgtctgatacgcaccgtgtgaagctctctgcgtcctggtgtctgatatgcaccgtgtgaagctctctgcgtgctggtgtctgacatgcaccgtgtgaagctctctgagtgctggtgtctgatacgcaccgtgtgaagctctctgcatgctggtgtctgatatgcaccgtgtgaagcactgcgcgtcctggcgtctgatacgcaccgtgtgaagctctctgcgtcctggtgtctgatacgcaccgtgaagcgctctgcgtgctggtgtctgatacgcaccgtgtgaagctctctgcgtcctggtgtctgatatgcaccgtgtgaagctctctgcgtcctggtgtctgatatgcaccatgtgaagcactgcgcgtcctggtgtctgatatgcaccgtgtgaagctctctgcgtcctggtgtctgacgtgcaccatgtgaagccctctgcgtgctggtgtctgatatgcaccgtgtgaagcgctctgcatcctggtgtctgaaatgcaccgtgtgaagcgctctgcatcctggtgtctgatatgcaccgtgtgaagctctctgcgtcctggtgtctgaaatacactgtgtgaagcgctctgcgtcctggtgtctgatatgcactgtgtgaagcgctctgcgtcctggtgtctgatatgcaccgtgaagcgctctgcatgctggtgtctgatacgcaccgtgtgaagctctctgcgtcctggtgtctgatatgcaccgtgtgaagcactgcgcgtcctggtgtctgatatgcaccgtgtgaagctctctgcgtgctggtgtctgatatgcaccgtgtgaagctctctgcgtcctggtgtctgatatgcaccgtgtgaagcactgcgcgtcctggtgtctgatatgcaccgtgtgaagctctctgcgtcctggtgtctgacgtgcaccgtgtgaagctctctgcgtcctggtgtctgatatgcaccgtgtgaagcgctctgcgtcctggtgtctgacaggcaccgtgtgaagctctctgcgtcctggtgtctgatatgcaccgtgtgaagctctctgcgtgctggtgtctgatataccccgtgtgaagcactgcgcgtcctggtgtctgatatgcaccgtgtgaagctctctgcgtgctggtgcctgatatgcaccgtgtgaagcgctctgcatcctggtgtctgaaatgcaccgtgtgaagcactctgcatcctggtgtctgaaatgcaccgtgtgaagctctctgcgtcctggtgtctgaaatacactgtgtgaagcgctctgcgtcctggtgtctgatatgcactgtgtgaagcgctctgcgtcctggtgtctgatacgcaccgtgcaaggcgcttcgtgccctggtgtctgatatacaccagtattctgatgtgcactcgtctttttcctgaaaatataccaaatctaaaatatcaggctcagccaatggagttcagctattatgagttttgagaaaacggcacagaatgaaactatattagattttggataatgcaaacacaagcagaaacagcaatactgctcaaagcgatgccattatttttcatgtaccctccccgacacacaacccatttaacattaaccttcccagcactctagtggatcacgaggtcaggagttcgagaccagcctggtcaatacggtgaaaccgcatctccactaaaaaaaaaaaaaatacgaaaattagccaggcgtggtggcgggcgcctgtagtcccagctactcaggaggctgaggcagaagaatcgcttgaacccaggaggtggaggttgcagtgagccaagattgcgccactgcactccagcttgggtaacaaagagaggttccgtctcaaaaaatactaacctaagggaaagtaccagacctttacgttaaaaacaccaagagacgagaaacagatgtgcgcatcccgtcagaccccggccatggggggcccctcccagctgccacagccacgcctgcacatgcttaccagacgtggtggctttatctcggcaggaggcttcccgttctcctgtttcttgttgagcctttttgcctatttcctgctgtgtgagatattcttctagtctttgcaggccttcctgggaagacagatcaacaaaacagcccagaaattcccagtattcaacccagggataccccagctcatgagctagctccctgtaagaaacaaaacacaattaaccagctgtgaaaccagaaaaaatactcagaactacacagaaaaaagccactaaagcttcaagtaccaaagcaatgtctgcaatcatggttataattttcctttatccttaactggcagctgaaatcatacggtgcattttctgaaacagcacgcctcctcacaggtaagcaggacccggcacagctctcaggagccgtgaaccggctgcaggcaggaaggaggcctcagcccgacagaccctcacgccagcaacccaggtcacacagttcaactcccacagacggacgtgttcatgatcacggaacagccctgtgaacttgcccgtggttctagtcatggccaggcacacgaaagcctggaggtcctttctgggttccagttgtacacctgacactgggcacatattttgagaaaatattctaaacaattccacgaagctttatttgattacagcataatttagctttgtggctatggcctattttttcccaaggaatccatagcattatatggtaccttctataaaatattaaggttccttagaaacatgtcccagaaccaacaaggaattccaattagaaaaggaaaggaaggcactgcagacatcccccaggtctgggacgggactggcttaagctagaattccacaacatccacaaggaattagaccttcacgaaaaggaccaagtctcccagaaaagccttctggaaattggtactttgaagctgtgatttgaccttctgtcattaatcaaaatgcaaccaactgtgtgccccacgctgctgcggctcagcctttcagtaccttcccactctctcaaagcctctttccgggtccgacttcttgacgtggtgaaggaagcctgctttctctcgaggtggagttttccagagcttgcgaaaatcttctgcctatgaagaaaaaaaaatgtattgagccgtgtcaggcactgcgcccctcagctgcggaaacctgaagagccgtcgtcatcgcagtagctgcctgtctccgcacacccttccttctctccccttcactagcagatccctgggccacgtgcccacctgtggcatggctgagtggccgcacggctgcactctgacctgggggaggggaggcggtctcctttcttgcagccccgtctgggctgtgaggttcagaaccaggagggcccgagcacgaggcctcaccctgaggacagtggacggctcggagctgccaccccgacgcacatgtgacactgctcccatcgcaggagaagaaaccagatctttctcagtcactctccctagagctttatgctttatgcatctcacctaaccttacctgataccacctaattttggggccattttcttttttgttttggagacggagtctcgctctgtcgcccaggctggagtgcagtggtacgatctcggctcactgcaagctccacctccggggttcaggccattctcctgcctcagcctcccgagtagctgggactataggcgcccaccaccacgcccggctaattttttgtatttttagtagagacgggtttcaccgtgttagccaggatggtctcgatctcctgacctcgtgatccacccgcctcggcctcccaaagtgctgggatttcaggcatgcgtcccggcgcccggcctggagccgttttcatcgcaactgatttagaaagtttctagcacaggatggtgcgtgcaggtcagtgtgtgaagtattccaacaggagaaagaattgtcaactgtaaataaaaaagtgtacaacctttgacccagcaacaccaccattaaggatttctctgaacactggggatgagtagaacctggggctgaggcttccaggagagggacttgtctgagaggaagccagcgggggctgcagccacagggaaacgtggtcaggaggtggacgtgcagatggagctttcctagtcacaacgggcagcctcgctacaccagcaaggtgcctaggacgggccatcaacacagcaagaacagggcgacacgcgcacaggacggggctggcccagggaatgtctgctttgttgagacagtggctcccagcacatcggccctggtaagcaagccacagagccaagaacacacatttctctgacaaacgttctcatcaccaatcactggtggatggtttgagatgaggacaaccttggggctccacaggacatggtccctgagaccacgcacaaggcaacaggctggaacacccagcagcacagtatagggacagccaggcaccacttccagaagcttctacagcagctcaccttggctggactcaggggccctgcgaaggctctcagggtcagtaccgggtctctggggctgcctccatagcggctgacgtgagaggcctcagccgtctggtctggggaccacagctccccgatgactggagaagaagtctcttccgctctcaggaggggcacgtagtagtggcctgagggaggagacaggcactggctgcaggcttccgccccctccgcaggtcaggcctgggtgagcaggacggggatcacgcgagcccttgccaaggcctctgcaaatggatccaacagacggggcagagggtggtttccgccagagctcactgcacttaatgcaaatggatacaatggaaacaaagtcacacaaggtctcagagctcacttcacttaaccagcctcattttcctccactgctacaagaaaagaaagaaaagaaaaggaagccccaggtagttaaaggactaaggggtcggacctgagtgaataagagtagcacacagtaggagcttaatacattttaaaaatgttatatttcattccagccgggtgcggtggctcacgcctgtaatcctaccactttggaaggctgaggtgtgtggatcacctgaggtcagaagttcaagaccagcctggccaacatgatgaaaccccatctctactaaaaatacaaaaattagccgggtgtggtggtgggtgcctgtaaccccagctactcatgaggctgaggcaggagaatcacttgaacctgggaggtggaggttgcagtgagccgagatcacgccactgcactccagcctgagcgacagagtgagaatctgtctcaaaaaaacaaaaaaaagtaatattttattccttctctcctttttttctcctcttagtttcagacagagtctcattctgtcacccaggctggagtgctgtggtgcaatcatggctcactgcagcctcgaactcccaggctcaagggatcctcccacctcagcctcttgagtagctgggaccacaggcatgcgccaccacacccggctaatttttactttttgtagagatggggtcttgctctgttgcccaggctggtctcgaactgctggatgcaagtgatcattccacctccacctccaaaagttctgggattacaggtgtgggccgctgtgcccagcctcctcgcttctcagtcctgcttctcttgtagtttatcacaggtgtgggctgctgtgcccggcctcctcgcttctcaatcctgcttctcaatcctgcttctcttgtagtttatcacaggtgtgggccgctgtgcccggcctcctcgcttctcagtcctgcttctcttgtactttacaatttgcatcactgaatacgcatctctcaacagatctggaatcacacggcacttggatgtgagtatggaaaaagcacaaggaagagtagtgtcttcaggtcccacgggacagcgcagtcaagccatataggatagtgtcgtgaggttctgtaggttgcacggaggccacacaccacctcgtcctgctttcaaacccagctcctggagacccagagtcaagaggcttcctttacagtcaatcatgctactctggaatgcctgggaatttcttatgttaaaggcttatcatagtttcatagttttttttttttttggaaacagagtctcgctctgtcacccaggctggagtgcggtggtgtgatctcggctcactgcaagctccacctcccgggttcacaccattctcctgcctcggcctcccaagtagctgggactacaggtgcccaccaccacacctggctaattttttgtatttttagtagagacggggtttcaccgtgttagccaggatggtctcgatctcctgaccttgtgatccgcctgcctcggcctcccacagtgctgggattacaggcatgagccaccgcacccggctgcttatcatagtttttatgcttttaatttttttctaattgtaaaagtgctgtatgcccatcaacggtcaactggataaagaaaatgtggtacatatataccacaggatattaagaacaagatcatgtcctctgaagtaacatggctggagctggaggccatgaccctaagggaactgacacaggcaagaaaaccaaacatggctctcacttatgagtgggagccaaacgctgagcacacatggacacaaagaaggaacaagaagtcagcagggcctggttgagggtggagggagtgaggaggagggagaggatggaaaaactacctcctgggtactatactgatcaccaggtgaaataatccgtaccccaaaccccggtgacatgcaggttacctatataacaaacctgcacacttacccctgaacctaaaatgaaagttaagaaaaagtacgacaatttccattcaagagtactgaaggtactgaagaatttccattcaagagtactaattttccatactgaaaattagggcaattcaaatactctgtcttacatattactatcttatatttggatgcatcctatgtatgttggcattttacaggttaattggcagttttttccctctttcagtggcacaggaaaagaagacatacagtatgtacagtatagggtgcatggtaggtatacggtacaatttacctacactttactcataaaatactaatgtttacttttttggcatattgatttgagtcccttttaacaatttctgtctacagatgggactcacggtctctggacagttttgtgcctggctttctgatcctatttgtctctcataacactttagagtccttcctcatcttcacacaagcgtgggtctctctctgagtgacgggaagggtgggatgcaggatgcagccagccctgtagcaggctctgtggcatgtgaagctacaacgtgaccgaggccccagcgtgaccacagatgctgaccatgcctgggcttcgcatgagcctcagaaggaccaggaaggaggtgtaggagctctggaggtgccgtgtagctcagcccacaggaacatggatctcacagagctgccttctcctcagcaaacagctgctggggcagatcttagaggcgacagtgttttactgtcacacataggcaaggatctctcagacagaattgcttcctaaataccatcacaaagcaatgcttaatgtcagcgttgcaaagcatttctgacagtgtggtttgaaaatccggagcagactctcggctcttcagggatgttctggcaacatagctgtgtgttcccagggcctctgaaggttccggctgggcctctgcagcgacgcctcaacggccctgaggaggaactctcgccgctaacagcatgcaggattcatttcctgtgcacagctacacacactgaagaagtgtaattaataaattatacctaggacgggaacagatcaggggacaagcagaggctcttcacaccttagatcacgcttggtaaacttctataaaatgtcagacagtaaataattaggctcagtaggccacaagtcactgtgtgctgggaaagaacccggacagtgtgcaaatggtggtgacagctttatgctgataaaattttatttttaaaagcagtcatttgcggaccctgctttaaatagagacagagttttggataggaatggaatccgagagagaggaaagcaggcaggtgggtgaaaggacctcagcgtctgcttcaatctcaccagcaagcagaagctccagacttcgagctaagatggcaaagaagaggcgcttctagaagtgtcatcttccaaaattcactgaaaacagaggaagatggcagggaaaagccatccctgaaaccagccgttttcacatgcctggcacctacaaaccgcaaggcacaggggccaacaactagaagctgctgactagaagagggcggcccagaaagcaaaggcctctctcccagaggcgagtggggagggaacgtcccggaggcgagtggggagggagtgtcccggagccaagacaggagcctgggcgtgcaccaggagtacaggaggaggaaggaggcagcttcagaatcgaaggagtgacagggagcgacccccaccccaacacaggcaaagagacacacaaaagccaggccagccacccagccaaggagctctggaccctgcctctccctgagctgttctttgccaactgcaggctccacctgaagagaagccatcacaatgaagctactgcgagagagaccgatggatccagggatgaggccaccagcaacaggcagcgacacacaacctcaaaaaagttctctcacagaaagctcaaggaacagatacaagacttcagagaagggataacagaaaaaaggtggcaaatgagctaggagagctcaggagaagaaaggatgatcccgaggagaggcttccgaggggagccggcacacgcccggggagctcaggaaagcaaagctctgctgtgtcccccaacgctccaaggcccttcccggcgtggaccccacgatccaggcaccaactccccatcttaccctttaaatactctctgatccgctccttcagttccacagatttatttttgcttctttcacaaattacctattggaaaaaaaagtgtgtctaaatcttatttgatcgcaacatttccttatcattacaatgatttcagaaaaatagttttaaactcagtaaagtagaatagtatcttaatgctaaagatttaataaagctcacactcagaaaacgtgtgaagagtgtggtctttctaaaagtctaaggagacagctaggagaacacactctgggattatgggtaaatttacttcttgtttgcgctactcgacattttctaactgtctgcaaggagaggaaaaggtaccagcgcatcgagtaaaagcagaagcacgtgaacatgtttctaaccttcttggttggttgagttccacttacaggaagcctggtcatacacaaactttttgttgtgaggctgggtcaaggtggagctcctaagtaacacggaacatcaaagttctatttttgccactaaagaaatcaactttctcagcccttgaagaattgcagcaatacgaacttttgctagaaactatagaaaaaccaacaaccttcaaataaaaggaaagaaaggaaccagcctatgagagaaactaattaaaactatgaatgcaactacatttttgagtctgtacctgattgtgagctttaaaaagtcaaatgctttttaaaatgccaggagttttaagttggttaccaaatgccattcttatgttgaagtacagatacacacacacacacacacacacacacacacacacacaaaaagaatcacatgtatgcaaaataatagcaatttctcagttgtagaattttctggtgaattttattctttttgatcaagcagtattttaagttttctatggcaagtggatgtatagcttatgtaataacagcaattacagaaggggtgtgggagaggccactgccaccagaagatccttatagcttttatttctaaagggctgctagacaagggacagctcacagctgtaatacacagaaaaatcaaactcatctttcagttctcagaaggtccagatacttcttgcactttgtgggcacagaatatacttctgccctctgcaaggtgcactttgctcaactgctcaggatcatgacgaggcctgactgaaggcttgtctgggtccgatgagtatgtatgtgtgagaagcttagcacagcacctggtgcacactgagctgaatacaatttagctgctttcagcatcatcatccttaccaccatcgtcaccatcatcaccaccactgccaacaccaccatgatcattgctatctccatcctcaccaccatcatcctcactaccaccatcatcaccatcaccatcatcatcaccaccaccatcaccacctctgttctctctgactctggtcaactgatgtgttcagagagggaacttgataaaagactgtgagctgttcaaagcaactgactgccagttttaggaaaataaaatcagcaaactgcgtcagttccttccctcctggttctacagatgcatcttcttcacaaagtgcatcttactcaacagccaaggttctaacatgtgcccataaagcaaacacaactcatacagagctccttgtggcttccctgtgcctgtgatcacagactgtaaatttatatatttccatttctaactctagatagcaactgcattgtaataagtacttacatcttcaggtgttttatcatatttattccttgagttttttacaatcaaatggtgtgacgaaagcacgttgactacatctgcatttccaaacttacaagcaaaatgcaacggtgtgtcatagccctgaaaaaaggtgcagaggaagtacaattattcacacttgtctcatgaggttgctctaaggtgaaaatacatattcattcattcattcattcatttatttattttgagacggagtctcactggcgtgatcttggctcactgcaacctctgcctcccgggtttaaccgattctcctgcctcaggctccccagtacctgggactacaggcacccgccaccacacccagctattttttttttttttttaatatttagtagagatggggtttcaccatattggtgagactggtctcgaactcctgacctcaggtgatccacctgcctttgcctcccaaagtgctgggattacaggtgtgagtcaccgagcctggcttatacttttttaaaaaaaaaaagactcacaaacaaaaaggccataaaagactctgcttttataatggaaaaataattggcattctagcacatacccacttcgtgccaaggcttgagcttagcatactgacctgggtgcccagaccctggaggagcttaaattctccataaacagtgaacagcagctttaaccattcagggcccagtacaatgtcatgtaaaacatgcccaggaagtgaaatacacagatgaggaccacaaccagaataaagcaaagcgcacgaatttggtctgtactcaaagaagtctctgcggcctgtgacaccacagtaaacgaaatttttttcactgctgacgatgctgcatcgcgccctggctgggaacccaggtctccgtccatgacgctgcgtcacgccctccttccccggatggtgtcacaggtctccacaccatctgcctggagctcccacagctgcacctctatccttccttatgctctgggcagtctcaatgtcaccttcaactgtggcctacagaccagcgggcctcatggtcaacagtgcccctgagcccaagacctgaagggccaactccctcccagtcacctcacttggacatcccacaggcagctccactgcaccgtgtagaaaacagaattcatttacacctagcacagccagaaacaccttctctcgtcacctctgattaccaagattctggctgtgaagtgtccggtggcatcgtatgccatggcagccatccctaagcttctgcacagggaagaaaaactcatcatggaccctgcggcctgcactgacacccccgcctccactccctggcaacacagcctaggtcacccgcaaatgtcctcctacagctccctcccgccatcacccactagaggtatcccttacaactctctcacacgaccccaaaaaggtctggatgtttgcatataccaccacgctacctgtactccatccttctgtccaggggctggcaagctttcttggacaaggaccagatagtaagcactatagactttttttttgagacagagtctcactctgtcgcccaggctggagtgcagtggcgtgatatgggcttactgcaagctccgcctcccgggttcacgccattctcctgcctcagcctccccagcagctgggactacaggtgcccgccaccacgcccagctaattttttgtatttttagtagagacggggtttcaccgtgttagccaggatggtctcgatctcctgacctcgtgatccgcctgcctcggcctcccaaagtgctgggtttacaggcgtgagccactgcacccggcctcacaaatctttcttaaactacaatactggctaccattcctattaaaacagccagcagaggcagctcccgggcagcgtgcgtgcagtgagcaaccctgctgctgcctgctcggctcccacagcccatcactcggctcccacagcgcccgcaccgcggcccatgactgcctgaacacagacgccgccagccaagatgtcaacccgaattctcctcacaaaggcctgccgtccaactccatgaccaatgtccctgttgacacaggtggggctgcccaggctactgctgttgagggtctgacagaggctgaggaggaagagctcagggcccagctaccaagacggatgaggaaactgtcactctacaccagtgctggcagccaaggagggggactgtggagagcttgagaggaggctgggcctctctgccttggaggctgaaacggaaccctctctaacgcctatgtgaagacttctgagaaatgtggaagtggaatgagaaagtggcccacccggatctctgcaagactcaggaaatgctcccacagcaagacagaagacctcaaccaagacagagacctcagcggccctgtccatggtgggctctgccatcagtaggaagctcggagacgtaaggaaatttgcaactttcaagtcgtttgaagaccaagttgggcccatgaagtctaaggtcgtgggtgacagagaacagcaaggacaatctcccttcctcagcagggaggggcgacgagcccgtcggatcccgcacctctctaagcctgtggtcgcttacgctcagctgcagagcacacacacacaccctcagcatcacagccggagctctgagcaacaaagcggccagccaggacgcacacgcagagccggctttgagaatagtcctgcccatccacaaggagacgtggctaccgcatccacatgaatttcaacagttgtgtacatagttatatactaaagtttgtaggtgaaacagataactgtgctgtccttcctaggggtacaggaagtggacagggcggaggatttgaaatactgagccaaagcccaggctccctttaagaatcacgttagtggccaggcacggtggctcacgcccgtaatcccagcactctgggaggccaaggcgggccgatcacgaggtcaggagatggagaccatcctggctaacacggtgaaaccccatctctactaaaaatacaaaaaaattagccaggcatggtggcgggtgcctgtagtcccagctactcgggaggctgaggcaggagaatcagttgaacccaggaggaggagcttgcagtgagccgagattgtgccactgcactcccacctgggagacagagcaagactctgtctcaaaaaaaaaaaaaaaaaaagaatcaggttagcccatcagaatgttgaagcattgaagagtcctacgcataagtggcatttttgacctcctccttccctaactcacagaaggaatgcaatcacccagaaagccctacctgttccatgagtttttatcttgaaatgctaaacaagaagtgtccatttcctgcccacagaaagtaaactgaatatcaacaactgcccaattgttgtactaatctagctttaatgaaaagcaaattcattatttttttttaatgcagtggacttttcaaaaatcgaaattaggcaaagcagctttagcctcctagtgagagaatattatttctttggactcaagctgaaattcaagcctcacattacctcatgctttatttatcataaacatataaatgagggttgctcaatggctgtgagtactgtgtgggattttacacctggcctgtgtgactgcctgttccagttggggtgttggtttcactaacacgctccatcccagtgtataaaacttgcttctcttctcaagcagggcagctcccctggctccctactctgccctgaaggacttttgggctcccaggggtgggaggggctaagagaaggaaaagcctgtctttagcaccctttagaagagctgtgcccgcttcccagtgctgccttgcatgggcctggcccggggggcactcatcagtgactccaacccgcctgctggctgcacttcagatgaaatgaccccacaggtcaggtggagggtggggcatgggcatcggccaggattgctgtcaccttttctccggagctaccaagatcgttcctgtttctaagcagtcgcaccccagcagcctctctctctccacagccctgcgtgtcaggcagcctctctctcacaccacagccctgcgtgtcaggcagcatctctctctctccacagccctgcgtgtcaggcagcctctctctctctccacagccctgcgtgtcaggcagcctctctctctctccacagccctgcgtgtcaggcagcctctctctctctccacagccctgcgtgtcaggcagcatggtttgcaggggcagctctgtgcctcagtggctcttggtaggacactgagggcctgcctgtggtgtgcacagctctgccactcccgggaggggaagtgctgctcagctcaaggtgtcctgttcggcagaggaaatgtcctctgacaaccgtgtccccagacagttcagacaccctcggggacagcatcgcacacacgacgacaatgcaggggccagggaaccccagcgctcggtgccctttgtccagtgggatgtggtaagaaggcaggttgcaggggtgtaattgatgtatcttttccccaaagttattatactaatgagtaacttgtcgataaagcattcttttggggaaagacttttaaccaattaaataaagaaagcgtgagtggagggtgtgcacgcaccatcttgtcgggggtgttgaggtacaggtccaccacgtaacggatacgcttctgcagcatggcctcgtcgtcatcagggtacatcagcctcatgaagtcagggttctccaggacgtccagagtcagctggcagatggaagcctggttctctttggcagcaacatgcatcacgttgtacctgcacccttcctgaaagagaaccgcatgctctgagcttcctatctgatgtgtggacacgccctgtgcgagtgctgcgatggaacggccgggaccgcacacctgcccgagggaaccgccgagacctacctgcacgatagtggggttgtctcctgagcctatcagataccgggggttgctccagataaggtcagaaaaggtgtcctcctctcccttctccacagctttccgaagcttggcggtgaggtcctgcgtgcggggatttttgtaactgttcgctcgctctttgttgactgtttctgattccgacaagcacaaaccatctgtcagtaagagacagaatttaagaacaatcagtttcaccaaaagtcactcatcacccatgcaccctctgatgagggataagcagctttccacagaggcttctgggccaactgggaggcacaggtgagaaaagacgagaagggcccacggccaccggccccagcatgcaacgcaatcaatggcagccagcgtgcccgtcagcagagcaagtgagggagagcagccagacccggccacaatctcactgggggccccagcctacaacggcagccagcgcgcccccatgagcacagcaagtggaagagcagccagaccctgccacaatcttgctgggaaaggctctgtgaatgaggccaagtttggtgaactttgtgttttttcagagacagggtctggctctgttacccaggctggagtgtggtggcacgaatatagctcactgcagcctcgacctcctgggctcaagtgatctcaggccctcaagtagctgggactacagttgtatgccaacacgcctggcttatatacatatatatatatatatatatatacacacgtatttttagagatgaggtctatgttgcccaggctggtctcaaactcctggcttcaagggatccttctgcctcagcccccaaaagtgttgtaattacagggacgagtcaccacacccggccagtgaactctgaaagctcggtcagtaggtggaggaggaataacggcagcagcgggcaagggaacactcccagaaatcacgcaagaccttcgatgtgcacagtgtggctgcaaaggattacaggattaaggagcctgccaccacgcccagctgatttttttgggggggacgcagttttgctctttcgcccaggctggagtgcagtggcgcgatctcagctcactgcaacctccgccttccagtttcaagcaattctcctgcctcagcctcccaagtagctgggattacaggcacctgccaccacggccagctaattttcgtatttttaatagagacggggtttcaccatgtaggccaggctggtctcaaactcctgacctgagatgatccacccgcctcagcctcccaaagtgctgggatcacaggcgtgagccacctcgcccggcctgatttctgtcttaaggtgatttccttctgaggaatcctcacaaattgcaaagaaggaaatccgtacctgttagaagccactctggtttccatccaggaagcacctgtataaggctgactgagggcaggcggatgactggaaggagagggcaacattcctctggagtaccagcccgccagggaagcccagacaactgtgagctgcgagagggagcaggaactgaggccagatgaaaggtaaaggcggaggttctaccccacactgaccgtgaagagcctcttcacacaaaaccctagttctgagctgggaggtgggcatgggtcagacttcgggctggaccgctcctacagataagcccgccttctccagatgccctagtccttgaagtaggtatagcttcaggtggggaagtagactggtttcaggatccaaaaaggcgcaggggctcacgcctgtcatcccagcactttgggaggctgagatgggaggatcacttgatgccagcaattcaaccagccttggcaacatggcaagaccctgtctccataaaaaaagtttaaattctagcctggccaacatggtggctaaaaatacaaacattagccgggtgtggcagtgtgcacctgtaatcccagctactcgggaggctgaggcaggagaatcgcttgaacccgggaggtggagcttgcagtgagccaagatcgcaccactgcactccagcctgggcgacagagcaagactccatctcaaaaaaaaaaaaaaaaaaaagaaaaagtttaaattagctgggtgtggtggtgcacgcctatttctcagctacttgggaggctaaagcaggtggattgcttaagcccaggagtttgaggctgcagtgggccatgatagcaccagactgcactccaggctggcaaaagaacaagaccctgtctctttacaaaaaaaaaagaaaaaaatccaacagacacggggacagatggaagcggccacagcgttcttttcagcttctccagagtcaagatgctaattacacgagcatcagagccagcatggcctcctggtccactgagaccccatcgactctaccctcatggagaaaacaagttaccacatcagaggaaagaaggcacaaaacagggtgggatcaatgtgacaggaacatcaagatgtgaacggctgcatgatttacctttcaacctgtcattgctaaagagtggagctgttttcacaggagacagtggtaaggacgttttgcttggagaagggaaataatcacaaattcctctagcaaatttctcagcgtcttctctggtagaaaaagctttaaatcgggaccctttgatcatcttgacagcttgcaatgcttcctttttattttcataaacatagatcctttctgggtaagaaaagtaacaaatgaaaatcagagaagagtgactggagagctgtcacctggccatgccctgggcctaaccatcagcttccacatctgctacccagtcgcctggcttagttcagatctttaatcctgaagaaaaagggcctaagctagccaaaatagaacaattaacaagctcgacagtgtgcatatatgcatgtaacatgatatatattatgttcatatatgtaattctatatgccaagattctatcctaaaaactaaatttcatataaagatctaaataaaaattattaaaaggcaaattaaaaaaaaaaactataattatgtcagccaagaacataagagaattttaaacacaattttgaacagggaacgcctttttattttttactttatttttttttttggagacggagtctcgctctgtcgctcaagctcaagtgcagtggcacgatcttggctcttgcaacctctgcctcccaggttcaagcgattctcccgcctcagcctcccgagtagctgggattatgggcatccgccaccatgcctaattttttgtatttttagtagagacggggtttcatcatgttggccaggctggtctcaaactcctgacctcaggtgatctgtccgcctcggcctcccagagtgctgggattacaggtgtcagccacggcgcccagccgggaatggctgtttttttttgacatggagtctcactcagctgccgaggctggagtgcagtggtgtgatcttggctcactgcgaccatcatctcccaggtccaagcgattctcccgtctcagcctcccgtgtagctgggattataggcaccggccaccatgcctggctaattgttgtatttttagtagagacggggtttcaccatgttggccaggctagtcttgaactcctgaccttaggtgacctgcccacctcagcctcccaaagtgctgggattacaggcatgagccactgtacccggctgggaatgcctttttaaacatgccaagaaaccattcaaaacaagataatcctgattatataaaaatattaaagctctgtagtggaactatcacaattaagttttgtatgagactatcgtaaatacataagatatacactactggccaggagacaaaaatttatgaacaatgtaacagacgaatggttactgtccactactggataaaaatagccatagttcgggcacggtggctcacgcctgtaatcccagcactttgggaggctgaggcaggtggatcacctgacgttgagagtttgagaccagcctgaccaacgtggagaaaccctgtctctactaaaaatataaaattagccgggcgtggtggcacacccctgtagtactagctactcgggaggctgcagcaggaaaatcactggaacccaaaaggcagaggttggagtgagccaagatcgcaccactgcactccggcctggcgacagaccgggactctgtctcaaataataagtaaataaataaataaataataaaaataaaaactgcaccatgatcatttcccagtgttactttcttttttttgagatggaatctagctctgtcgctcaggctggaatgcagtggcacaatctcagctcactgcaacctcagcctcctaagtagctgggactacaggtgcccaccaccacaccccgctaattttctgtatttttagtaaagacggggcttcaccgtgttagccaggatggtctcgatctcctgacctcgtgatctgcctgcctcggcctcccaaagtgctgggattacaggcgtgagccaccgcgcccggcccctacgtattctttaaaaagatcttacagaacaatattccattctattcatagtgtttaaccaattatgtactcataggcgtcaccacaaatggtatcacagtaataacaatactcataacagtgtgcaatttctggcatcccaattaatactgagttctcatttcttttttccaatgctaaatcttctttaaaattacaattcttgggctgggcacagtggctcacacctgtaatctcagcactttgggaggctcaggtgggaggactgcttgaagccaggagttcaagaccagactaagcaataaagcgagacccagtctcttaaaaaaaaaaaaaaaaatttaattacctaggtgtggccaggcgaggtggctcacgcctgtaatcccagcacttcgggaggctgagcctggcagatcacttgagcccaggagttgggagaccagcctgggcaacatggggaaacattgtctctaccaagaatacaaaaaaactggcgcgtactggcacgtgcccgtgatcccagcgatcccaagctactccggaggctgaggtgggaggactccttgagcctggtaggcagacattgcagtgagttgttgagattgcatcactacaccccaacctgggtgagagagagaccccagtctcaaaaaaaaaaaccaccaaaaacaaccaattagctaggcgtgctggtgtgtgcctgtaatcttagcactttgggagaccaaggtgggtggatcgcttgagggcagttcgagagaagcgtgggcaacgtggcgaaaccccgcctctataaaaaatacaaaaattggctgggcgtgatggctcacacctgtaatcccagaactttgggaggccgaggtgggcagatcacgacgtcaggggttcgagaccagcttggccaaaatcgcgaaaccttgtctctactaaaaatacaaaaaataaaaaattagctgggtatggtggcgggcgcctgtagttcccagctactcaggaggctgaggttacagtgagctgagatcgcaccactgcactccagcccaggtgacagtgcgagactctgtctcaaaaaaacaaaacaaaacaaaacaaaaaaaaaccataaaaattagctgtgcgtggtggcgtatgcctgtggtcccagctactcaagcggctgaggtgggaggatcacctgagccagaaaggttgaggctgcagtgagctgtgactgcaccactgcaatgcagcctaggtggcagagtaacaccctgtttcagatgaatgaataaattaaaaaaataaaatggccaggcgcggtggctcaagcctgtaatctcagcactttgggaggccaaggcaggtggatcatgaggtcaggagttcaagaccagcctggccaagatggtgaaaccccgtctctactaaaaatacaaaaaattagccaggcgcggtggcaggcgcctgtaatcccagctactcaggaggctgaggcaggagaatcgcttaaactgggaggggagaggttgcagtgagctgagatcacgccactgcactctggcctgggcaacagagtgagactttgtctcaaaaaataaataaataaataaaaacaaaataaaaccacaaatctttgatgctgaaaagtatttatacactcattggccatttgcattcattaacataaaagatgtgcaggttacactgcattttaaaaaggcggagatgactaatcaacaaagttcctaaccaacagcagcagccagttaatattaatatctcagtccagcatatctcatagaatccaatttacctcacaaattttaacagttctcatgttaaattcacaaatatttcagaaaagttctacataaaaatgttaacaatggttaactggggtgatgagatggaggggattggattttttccttcttaatctgtagttttccattttcagacgtcatcccgcccctccgcgtatgtgctatctgtgtgaggaaatcctacacacggtcccattaccatttctcgctgggacgtcctcatacactggacacaccccatagtacaggggcggctccttagacgcagtcgctccagctctgtaggtgtcggtgtcactagggggcaccgagcaggtcttggatgtcacagcttcctcctctggaggattcaggcccacactgtaaccaaaatctctgtcttcagaaaaaccagcctgatcagttgggttcccttcagctggcttcaaaatcctttgtgggtcctggctgagagctgtgacacctgcctcatggtggtagaaagaagacagccttcctccttgctccagtaaagcctgagccaattttttctcaaaaatgaaccttgtagttgatgtaatgggtccacatttcaatccggctttgacgatttcttctctaaggtcatctggattcagaagtttcaatcgagccaacagagcatccattgtcatttcacctaggcccaagacaaaaaaatcaaagagtcacaaaatactaacacctgctgaagctgggtgatgggtactagggttcattatataatggcatcagtttctgtttctttcattaaaaactttttttcttggctggacgcggtggctcacgcctgtaatcccagcattttgggaggctgaggcgggcggatcatctgaggtcaggagttcgagaccagcccggccaacatggtgaaaccacgtctctactgaaaatacaaaaaattagccgggtgtggtggcggatgcctgtaatcccagctacttgggaggctgaggctggagaatcgcttgaacccaggaggcggaggctgcaattagccgagatcacacccctgcactccagcttagacaacaagagcgaaactccagctcaaaaaaaaaaaaagaatttttcttttttttttcgagatggtgtctccctctgtcgcacaggctggagtgcagtggtgctatcgcagctcactgcaacctctacctcctgagttcaagtgattctccagcctcagcctcccaagtagctgggactacaggcgcctggaatcacacctagctaatttttgtatttttaggagagacggggtttcaccatgttggccaggttggtcttgcactcccgacctcaggtgatccacctgccttggcctcccaaagtgtttggattacaggcgtgagccttttttctttttgagacggagtctcgctctgtcaccaggcaggctggagtgcagtggtgcgatctcagctcactgcaacctctgcctcctgggttcaagcggttctcctgcctcaagcctcccgagtagctgggattacaggcgtgcaccaccacgcccagctaattttgtacttttagtagagacggggtttctccatgttggtcaggctggtcttgaactcccaacctcccaaagtgctgggattacaggcataagccaccatgcccagcccgttgtattctttgggaggcaggcagatcacctgaggtcgggagttcgagaccagcctggccaacatggtgaaaccctgtctctactaaaaatacaaaaattagccgggcgtggtggtacatgcctgtaaccccagctactcgggaggctgaggcaagagaattgcttgaacccagtaggtggaggttgcagtgagccgaaatcacgccactgcactccagcctaggggacaagagcaagaccttgtttcaaaaaaaaaaaattacccgagcatagtagtgcacacctacagccccagctactcagggggctgaggcaggaggatcacttgagcctgggaggtggatgccaccacgagctgagatggcaaccctgcactccagcctgggtgacagaatcagaccctgtctcaacaacaacaacaaaaaaaaagatggcgggggggagtaatacatctgaatttaagtttctacagggttctgacttttaaaaacatgttcgtgatttacatactcaaataagtaaagccgggtgcggtggctcacgcctgtaatcgcagcactttgggagaccgaggtgggtggatcacgaggtcagcagttcgagaccagcctggccaagatggtgaaaccccatctctactaaaaaaaaaatacaaaaattagacaggcgcagtggcgggcacctgtaatcccagctactcgggaacctgaggcaggagactcgctggaacccaggaggcagaggtcacagtgagccgagatcgcaccactacactccagcctgggcaacagagcgagactccacctcaataaaacaacaacaacaaaaaaaacaaaaaaaaaagaaataagtaaataaacaaaaagatgggggagacacccacatggaatactagccagaagaaatgcacctaactgtattacaagtgagtaacacaggggaagctaacctacgtaactttggaaaacagtgagtgactaggtgctctaaggagaaagacaaaaaggactgtgcaccattaccgtgtgaacaggctctaggcagtagatgttttcacaatggtataggttaacacacctaaagctattttctgtggactctagggcaaagcaaataattggaatacacggtggctgatgagagccaggactctcaatgacagaaaggaaagtgggagtgagaacagggtttcagcaaacgattcctgtaaagggcgagagagtaagcatctcagactctatgagccaaaggccacgtgagtgctcagaacagccacaggccgcgtgtggcggctcacacctgtcaccccagcgcttggggaggccgaggcgggaagatcacttgagcccaggagttcaagaccagcctgggtaacacagcgacaccctttctacaaaaactttaaaaattatctgatggctgggcgcggtgactcatgcctgtaatcccagcactttgggaggccgaggcaggtggatcatgaggtcaggagattgagactatcctggcaaacacggtgaaaccctgtctctactaaaaatactaaaaaattagccggccatggtggcgggcgcctgtagtcccagctactcaggaggctgaggcaggagaatggtgtgaacccagggggcagaacttgcagtgagcagagatggcggcactgcactccagcctgggcgacagagcgagactccgtctcaaaaaaaaaaaattagctgagtgtggtgacgtgcacctgtggttccaactacttggggggctgaggaaggaggataaattaagcctaagagtttgaggatgcagtgagccctgtttgtgccactgcactccaacctgggcaacagagcaagaccccgtctccaaaaaaaaaaaaaaaaagaacagccacagatatacataaacaaaagggtatggttgtattccaataaaactttactaaggaaaataggtgggggccagtttggaccacagtttactgactcttgcattagaataaagccagggagccggacacggtggctcatgctggtaatcccagcactttgggaggccaaggtgcatggatcatttgaggtcaggtgtttgagaccagcctggccaacatgatgaaaccaggtgtctactaaaaacacaaaaattagccaggcatggtggcatgcacctgtcatcccagctactcagcaggctaggtgggagaatcgcttgaactgggcaggcagaggttgcagtgagtctccagcctggacaacagagtgagactccacctaaaaaaaaaagaataaacccgcggacgtcgcattgaaattggaagtatcagtatgatcacaaggtctttgacagatcgatgggtaaagatgtgagaaacagctaggtctgaacactgggttataatgttccattaacaatttttttttttttgagatggagtcttgctctgtcgcccaggctggagtgcagtggcacgatctctgctcaccgcaacctccacctcctgggttcaagcaattctgctgcctcagcctcccgagtagctgggattacaggtacctgccaccacgccccgctatttttttgtatttttagtggagactgcctcaccatgttggccaggctgatcttgaactcctgaccttgtgatccacctgcctcggcctcccaaagtgctgggattacaggcatgagccaccgcaaccggccaagtacacaacttttgagactggcttttcctattcagcataatgcccttgagatccacccacgtggcagagtggatcgctgcggagtggcaccccggggcacccacgtggcagagtggatcacgcagtgtggcaccccggggcacccacgtggcagagaggatcgctgcggagtggcaccccggggcacccacgtggcagagtggatcgctgcggagtggcaccccggggcacccacgtggcagagaggatcgctgcggagtggcaccccggggcacccacgtggcagagtggatcacgcagagtggcaccccggggcacccacgtggcagagaggatcgctgcggagtggcaccccggggcacccacgtggcagagtggatcatgcagagtggcaccccggggcacccacgtggcagagaggatcgctgcggagtggcaccccggggtatcagtgtgcaagtttaaccatttgagttatttcagtttctggtaattacaaataaagttgctatgaacattaaatatgggtttttgtgtgaaaatagttttcatttgtctaataaaagctcaggaatgcagggcaggtttaacttcctaaaaacctgccaggctgattcccagagtagctgcaccacttaccgtccccacctgcaatgcacgaggcccagtttctctaaatctctgctgactatatatatgtatactatatgtgctatatgatatacacgtatcatatgccatgatatacgtatattatacatcatatataaaaacatatttttatataaaataaatcagtatttttttatttcagccattctcaaaacaccaccctcacccgccgccaccttgtccgcagctctgcctggatgatgccgctggtgacagtaacagcactcagaggtgcttaacacataccaagtgctgcacttacccaactcccaaaaaagcctaaccaggtatcactatcatccccattcctaaaagagcaggctgaaaacaggttaagcccacagcaataagtggtagggcccggtgcgatggctcacacctgtaatcccagcattttgggaagctgaggcaggtggatcacctgaggtcaggaattcgagaccatcctggccaacatggtgaaaccccgtctctattaaaaatacaaaaattagccgggcgtggtggcaggcgcctgtaatcccagctactcgggaggctgatgcaggagaatcgcttgaacccgggaggcggagcttgcagtgagccgagatcgcgccactgcactccagcctgggccacagggcgagactacatttcaaaaaaaaaaaaaaaaaaaagtggtagggccgagacacaaactcacacaattggacaggaatccccactcaatcatcagaaagcacctctccgcagtgactaacagtctgacaatttagagtaaaaacaaactcagtttctcccactagtcttgcaacatgcttcggacaccaggtatgtggggattttctccccacaaatcacgcaggtcgtcagttctgcagtggacacaggctgggtgtcgtctgtcatcctaattcagtcatctattctgacagcgtcttcctggagataccagcagacccccacaggttaacggctcagccccgcaagactgccccccacttccagtgcccaggttgtttgacctgcgcttgggaccgacggggcgtaacccggtgacctcctcaggttgcggtaatttgctagagtggctcccgaactcacagacatgttttacttacacttaccagcagagtataaaggattacaaagaatacaggtgaagagatgcgtgacgtaaaaccggggggaagcgcttggaaattcagggcctctctgggcaccgcctccaggaacccccacgtactatctggaagctccctgaacccagcccttttgggtttttacaggaacttcatttcacaggcgtgattcatcagccactggtgatcaacgcaaccttcacccctctctcctccccagaggttgggggtggggctgaaagtccccagaacctctaaccctgccttggtctttcctgcgaccagccccatccagaagctccctaggggctgccggccaccagtccactcagcctacaaaagacatcactttggaggttcccgggatttcaagagttgtatgccaggaaaaggggatggagctgaaatacacagttcactgtatcagttacctcaaacttaaaacgaccaaaacccacctctgatctccacatcacccagacccgacagtctaccgcaaagcaataaatggccaccttctccctcttcctctggccccaaacccctgagttacatttgccttttccgtctctgccttatgttccatgaccagtaaccgcaatggcttcacgttccaaacacatccgggacccaggggtttcctccccgcgccgccctcctttgggccatccctccccaggtctcgagagaccgcagcaagagtctccgctaacgcctcgccgggcccccgccgccttccccggaggctgctccagggcccgggaaagctctcacccccgaacccggcgtggcccctccgcccccggcccgggaagccaagtccccgcaactgccctttccgcggccggaatggcctttcccgaccggccctggtttccccggccgcctcgcccaactgctgccggctccaggggcgcggccgggaccccaggcccgaggagggcgtcggggcggggaaggggccagggtgcggggacccagcgaccgcctgggccttacctgaggcgggggcggcggccgcgcttggcggaggaactggggtcccgctgcggcccagacctcccggccgcgggcccagccgccgcaccagccaccgcacagcgatcagcagcaccgaggcgcccagcagctcccaggccagcgccgcccactcggccgccgccagccgcggccacagcatcgccgccgcccgggccgcagccgccgagaagcccgcgccccgcgccgcgcccgtcccaggaccccgcgccgggctgcccgcgccctgcctgacggcgccgcgctcgaggcggccggggcggcgcgggggacacggacggcggccccgctcgcggaggcccggcgagggcgcggccccggccctgggacccaagcgggcgggaacgggcgagcggacgggcgggcgcggcaggcggggcgcgggcagcccgacgcggggtcctgggaccggcgaggcgcggggagcgcaatgtgctggcgggggccggggctggggcccggggaggccaccagggcggggccgggcgcggggcggcgcttcttcgcgcctcccggccccggcctggcgtccgtggggcgctgtgcgtctccgagaacgaagcggcctccgggttcgtgtgctccgagcccgagtactgtttgcggccgtcgtcccgtcctggagcaggagtgaggaagcgcctctcactcccccgcgaacccgcagaacaggccgccggcgctatggagaccggcggagcttcccgctccttcaccaaggggccctgacgcgcagttgaaagcgcggattttgccgggcgcggcggctgcgtccggagtcccagcgccttgggaggcgaggcgggaggatccccacggcccgggagctcgagaccagcccgggcaaatattttgaaagtcatggtaaaagccgcaattacttttgcaccaacctaatagtgagaccctgtctcgaaaaagggaaggaggattttactgtatgtaatttagatgttttatttattttttgatgcggtgtcttgctctgtcgcccaggctgaagtgcagtggcgcgatctcggctcactgcagcctccgcctcctgggctcaagcgattctcctgcctcagcctcccaagtagctgggattacaggtgcccaccaccacgcctggctaatttttgcatgtttagtagagacggggtttcctcatgttggccagactggtctcgaattcttgatgtcaagtgatccaccagcctcggcctcccaaagtgctgggattacaggcgtgagccaccgcgccccgcctaatttagatattattaaatgaaaatgaaagacctgaaaaatataattgatatccttggttaaaaacataattgatctgagcgaggtggctcaggtctgtagtctcagcaactctggagcgtgaggggtgatggtagtttcagtccgggagttcgaggctgccatgagcgtgatctcgcctgtgaatagccactgcacgccagcctgaccaacatagcaagaccccatctcttaaaaaatatcattggatggtactaatggttggttgggcactacagaagaaagggtcagtaattttgaagatggatgaaatggaaattcaaaccacgatgagatgctgcttgaaatccaccagaatggctaaaatttaaaaattggcaatatcaaattttgctggcaagagcaaacactgagttaaccaccttggaaaatagtgaggcagtttctttcaaagttaa

SEQ ID NO: 27 - DNA, 225940 bp, Homo sapiens
  source 1..225940: mol_type = genomic DNA
agaaaacaaaaagcctggccaagatggtgaaaccccgtctctactaaaaatacaaaaactagccgggtgtggtggcaggcgcctgtagtcccagctactcgggaggctgaggcaggagaattgaacccaggaggtggaggctgcagtgagctgagattgcgccactgtgctccatccagcctgggggtcagagcaagactccatctcaaaagcaagcaaaaaacccccaaaaacccacgaagcccccaaaacaaaccacagctaatccgaacccagaaaaatagactggaaccttctggcttctccacacccccaccccaagcccgtaaatgaggtggacaaccctgcctttgctcaggctcagccctgaagggaacaggagggaatccacaaaagttctgttcacagatcgaagacaggagagggggcatggccccacgcctacccccaaccccacgcaggggcccagctggcgagggagctcacagcagcctttgggggaatgaagccactgcccccgccactggctcagcctggcagggctcagggaccctcccaggtcgggctcctccgcaggggacccagtgaccaggaccctgttgattctgatgcacgggcagtgtctgctcttctgtgggggttgtttctgtagctgccactccctccccagcacccaggtacaggggacagacagctcagaaggaaaagggtgaggcgcctccatcagctcaccctcctgtcacgccgggggccaacagtctcctggagccacactggctggagggtcctggcaggcatcctctgtgccaagatcctctgagcagaggcctcgcatctccatgcttgcctgagctgccttccagccaggacagggctctcaaagcgcggaccctcaccagctgcagctgccagggaactgtgggcaggggcacaagccagccagccacaagctgaagctcaggggcgtgcacagctggccacggggtctggccacggctgcagtgctcagatccgtggggagtgatgctcctgtttctctccagctcctacaagaggcagtaattccacagcattcccggtctgtgcaaaggcagaggacgaggggaacagataatttgtttcaaaattaaaagctaacaacttggtaggaaaaaggttttcttttttttcagacagagtctgctgtggagtagggtggcgtgatctcagctcacagcagcctccacctcctgggttcaaacgattctcctgcctcagcctccggagtagctgggactacaggcgcgcgccaccacacccagctaatttttggtatttttagtagagaggggattttgccatgttgggcaggctggtctcagactcccgcctcggcctcccacagtgctgggattacaggcgtgagccaccacgtctgtcctgggagtaagaaggtcgtcgagaggggcgacactgtgtcagtcccacacacagcccctctcctggagggacgcactgtacaaagagcattttaattaatttatttatttctttacacataactgaaagtgatgttacagtacataagttatttacaactgtgcagtaatgtgttgcaaaataaattatctagaaggcagcaaaagtacattgtgaaggtatataaaactgtacagcgtttacggatacactttttatatgattattggctctgtagtgtttcaagttacgttctcagaaagagaaacaaaatgcccaagattaaaggaaagaagatacaaaccacgcggatttgactccatttcaatacggctgggagtcctggctctgtgtccctccgcctggctccgcaccaggtctgaagcccagtctgaggccgtcgcagctcggcggcaacagaaccacggctgggatggggctcctgcccctccgacctgcaggtcactgtttgtgagaggtggacaccttaattttctttagttgatcagaatggaacaaaaaattttaaaaatgtactccgttctccaactcctgaaatgcctctgcagttgctggagaaaagggcccgaaggtcgccgttttcaaacagaagctgccgtgtgtgcgcgcccggcatggtctcctcatcccgccggggccagtgaggctctgggggctttgcccccgccgcggcagctggtagagaagagacgtgtttcacctccccgacgtctggaccagtctggaagggatggaggcgctgtggccaagtgcagtctctctcggggtctctccccgcccgggtggacagggcgctccctcctccgcccctggggctcagcagcagtcctgggcagccgtgcggccctcgcctgcgtcctgcggccgtcccgcggtgtcatgccggcaacaatacaaagtcgtcgttgacgtcgaccatgggcacgtagaaggagggcacctcgttcacgcacagggacttgtgcccggcggggtccagttcctgcaccttcagctgccactccatcctctgcacggcgttcagggccgcggcctcgtgctgctgccgcatgaggaggcaagtctgcgggacacacagcggggagaggagggaggaggagtgaagggagagccccagactctgccgacctcagctgccagcagggccaagggcgtgatacggccgtgaacctaccctggtatgggccaggcccagctgtacccgctcctggcatctagttactacacgtggcggtagcgccagctgtgctacatgtctgtccccataaccgctgtctatgccacctctaccctggcctggggctcaccctggcccgggggccctgccctgctctgggtgggcctgggactcacctccagcagccactgcagcttattagaatcgaacagctttgcttttgtcattttacaattacttacggccagtgatagtttcacttgtatttctagtagaaactatgccatttaaaagtgcacataaggggactggactggggtagcacatattttggaaactaatggagaaatggaagcgtggccagggagtactggtatgtcacaagcaaccgtgtagagaatcttttttagataccgtctcaaggctggagtgcagtggtgcaatcatgactcactgcagccttgacctctggggctcaagggatcctccctcctcaacctcccgagtagctgggactacaagtgctaccacgcctagctgatttttgtagagatggggttttgcgatgttggcgagctgcagtgtgatcatgtctgtctctaaatttttctcaacatatatatatgtatgaaatcgttttcgaagctcaggatggattcacaatcctcctcaatgggcctcatagcttttactcggcagctcagacatcaccagtgtaaattgttacatggaatcatataataccctttggatgttccaaactccggtgagtcactgaattactgatgggcctctgagtgagtttccagttttgttccagtgaatatttttatacatatccctaaggtttttttttaaattttgtccccaggctggagtgcagtggtgcaatcttggcttactgcaacctctgtctcccgggttcaaatgattctcatgcctcagtctcccggaattacaggcacgcaccaccatgcccagctaatttttgtatttttactagagacgaggtttcaccatgttggccaggctggtctcgaactcctgacctcaggtgaaccacccacctcagcctcccgaagtgctgggattacaggtgtgagcaaccgcaccccgcccaaagtcccattttaatgtagtcaaacatttatcttcttacaggaaagtcttccatgtgtctttatgaagctttcagttttttctcacggctctggttaggaagggcctagtggcctggggagggtgtggtgtgagtgacttcctgcaccatcatcttagggctggccagaaatgcacactcagctacgcctcagacctgagttcctcagcacaagcccccaggggccacgctccccaaatacccacagctcccaccgggtagggctggtggttctcatctgtgcccacatcagcacctttctgagagctgcagtatgacacacgggtgcttggttcagggacctgggtggtgctgagcctgatactgcaggtagccggggccgcctgctcccaggcctggctggtgactgtacagggtgacgctgactgtaaagttctgtaacttttggcaagtttccgccttccgttgcctcctggtggatcctccagggtgtcccggtgagcagccctcgcgaccgggataagggtgtgctgcccttcccggcacctcccccgcccctgcccaccgccctggccagcacttccagagcagtggagggtgaatgctgggaccttagagggggctcacagggcagtcccaggagttctgaccatcaagcctagggtcctgttgagctggcgacaggagccgctccctgcacaccgggacagaagggaagactgaggaggccacacgcagggacaggacctcacctccccgaaagcatcggccagattaagagaatctgaaattgtcaccgcccatcacagaactgggcagcggcctccccccaggcagcgcaaagggggttgtcaccacccatcacagaactgggcagcagcctcccccaggcagaactgaggggacgcgcaacaccgaccttcatgcggtcatacttgtcatccacgtcctggagccaggagatgaactggcgggcgttgaaacggtcgcgcactgacttgttctcgtcaccctgtggaaaccaaacacgggagtttcatcaggagccccagagaccgctacgggaaggcatgccagcctgggcgatgctgcagtgaccgttctcaagggacaaccacagggggagcctcattccaccgcgcacacactgaatcatgttcaaggcatggcaggcgcaccctgcccatctccctaaacagcctccctaaaatgcgcgtggaggcagctgggcctttgtctcctgggcaccgggtgcccgcaggccccacctgtgagccggtccccagccctgcccccaggggacagtcagagctcagcccactgccaactcctgggagagacttttttttttttttttaagagacagagtttcgcttgttgcccaggctggagtgcaatggcgcgatcctggctcaccgcagcctccacctccagggttcaagcgattctcctgcttcagccttcctgagtagctgggattacaggcagccaccacgcccagctaattttgtatttttagtagagacggggtttctcctgggcgagactttctagatatgtcaccgtcctgtgtcctgaagggtggacacggataagatgtccaggctcctcccctttttcacgggttcatggtgaagctgacaatgccgtctgtttctcagaacatgtggagcaccgacagaaacccacacacctgcagggaactcactttccacaaaggtgccaagaacagaataacgatcacagggaaaggacagtctcttccgtaaacggtgctgggaaaactggctacgcatcgcagaagagtgaaacgagaccctagctctcgccacatacaaacatcaaaccaaaatggatcaaagtctggaatccaagaccttaaacgatgaaaccactacaagaaaacactggggaaaatctccaggacattggcctgggcaaacatttctcaagcaataccccgaagcacaggcaaccaaagcaaaaatggacaaatgggatcacatcaagttcaaaagcttctgtccagcaaaggacacagtcaacagggtgaaaagacacgcacagaatgggaggaaacgcctgcaaaccgctcctgtcacacagattctcaagcagaacatagaaggcatgcaattaactcgatatgaaaaaatctaataatcccatcaaaaaaacgggcaaaagatctgaatagacgtttctcaaaggagacacacaaatggccaacaggcatctgaagaggagctcaacatcattgatcgtcagagaaatgcaattcaaaactaccgtgagacatcacttcaccccggttaaaatagcctttatccaaaagacagacaatcacaattgctcgcgaggatgtggggaaaagggaaccctcgtaccccgttggtgggaatgtaaattaaaacagccgccgtggagaacagtttggcgtttcctcaaaaaactaaaaattgagctaccataggatccagcaatcccactgccgggtatagacccaaaagaaagaaactgggggccaggcacggtggctcacgcctgtaatcccagcactttgggaggctgaggcgggcagatcacctgaggtcaagagtttcagactagccttgccaacatggtgaaaccccatctctactaaaaatacaaaaattagccaggtgtggtggtgcgcgcctgtgatcccagctacccgggaggcagtggctgcagtgagctgagatcgtgccactgctctccagcctgggtgacagaggaagactcagaatcacaaaaaggaaaaggaatcagtatattgaaacggtgtccacactcccatatttaacgcaaccccatttactatagctaaggcttgtgtccatcaacagatgaatggataaagaatatgtgctacatacacaacggagtactattcagccacaaaaaagaatgagatcctgtcatttgcaaacacgtggatggaactggggtcatgatgttaagtgaaataagcatacaaagacaaacatcacatgttctctctcacttgtgggatctaaaaatcagaacaattgagctcatggacacagagtagaacgacggttaccagaggctgggaagggttgtggggggctggcagggaggtagaagtggttaatgggtaccaaaaaaaaaaaaaaaaaaaagaatggataagacctactatctatctgacagcacaatagggtaactgtagtcaatagtaactgcattgtgtattttaaaataacatataagagcgttaactggattgtttgtaactcaagggctaaatgcttgaggggatggacacccattggagaaataaagagggaagtaatgcttccttggaaggtgttagaggcacgagctggtcctcctcatttttgctctgtacagagctgtcctgactgcctgtccatcacagcctctcacctgcggtacaagaatgcaaacttatcagcatccagcccccaaagcaccatttggtccaactcatgttttctttaaagaaaatctgtcggctgggtgcggtggctcacgcctgtaactcccgcactttgggaggctgaggcgggtggatcataaggtcaagagatcgagaccatcctggacatggtgacaccccgtctccactaaaaatacaaaaatcagccgggcatggtagcgcatgcctgtgatcccagctactcgggaggctgaggcaggagaatcgcttgaacccggaagccagaggttgcagtgagccaagatcacaccaccacactccagcctggcaacagagcgagactccgtcacaaaaaaaaaaaggaaaataaaatttgtcattgtgtatatgagagacattgataaaatacatccccaaagaaaggaagatctttaatgcacaaagagatgttttcaactaaacatctgggagcccctggctgtcaccacacagcaaagcctagtgcactgctcagagtgcccagggctggggtggcgtcaaggggggcacatattacgagggctctcggtgcgagatctggacaccaaggcaggaatgtgttccaggcacgtcccactgcacaggatgtggggcctggggtccagggagcccacaacctgagcgcagtgggctccgaggaggagggaggggctgatgcaggcgaggcaacgggagagccaggggtcccacatggacaggtcagtggtggctggaggatgatttctgaggcaggagtccctggcacatgggctgcttgaaggcagacaggaagagctgccccagggagagccacggggccctggccgcccacatcctatgtcccagtggacagagcaggtcaaaggcacgggagctgcaggggtgggcgggagccccacagcagatgggcaggacagtgactgtagttctggaaccctgagtccggcccgccctggcccagatgagcggcacacctgggtgcccgtgttcccttagccacccagtgtccctgctgtccccgtatgacagcccctggggcctgtgctgtgaaagccctcgatgtggcagccctggggtgcctgagagcagcaggtggagcccagcagtttaaacagaaaataatgccagcgctgacacccgtgagaggtaggtaggggcaggtgctccaactgcatggacaagtgttacggagggactgagctgctgaggcccagcccagtggcctgagggccttgcccgtgcggggagctgtctgctgtctgctgcagccttcttggctcctttctgaggctcgcccaaggctagaggcatgcaaaggactctgtagcccctgcaaggtgctgagcacccgggaagctcctggtcaaagtgcagaatctatcaaggggaggggaggcgggcagggtgcaggcacttggactcatgggcctggcatgcagacgggccctacctggctctccaggggcatgttgtagacctcggagtccagcagcatcgtgcaggcgctgaatggcactgcctggttggcgatggtcctggccgcccggcagtgaacccgcagaatctcctgctcacaggatacgatcagcttctcctgaaggaggagaggagtagagtgagctgggacacagccacgctccaggccccactgtcaacacgacagcccctggggcctgcgccgtgaaaagccctggccgtggcgcccccctgcctgtgccagcccacttacccgctcgatgctgtgctgtagacgcagctttccccggacggcctcctgctgcctgaacagctccttcaggggctccgccagggagggagggggtgcgatctacaggcaaaaggtgagtgtggggggtcagctggggctgtggaactgcacgaaggatatagtctggagttcacgggggtcccgactcagcctccccactcctaggagcctgccctggaggcctcctccagtcccagcaacagacacaccaggaagcttctagaaaccactatgtgctggacgcgggagagcggacacctccacggtgccccgtacagcaccacgcagtgaggagatagtgcagggagaggcgcgggacagtatctgtgggccatcgtgtgccaaggagggcctgaaacaccggcatgagcacccaactgtgcagaggagatacagcgagacagcaggagggggctgggggtaggctgagcttcctgtgttcacagggagggcccatgcaccccaaatcagcctttcaaccaggctgtaacgtgcacagtggaatatgaaagctgacaaccgagccggtggtcttgcagtggctcgggggagggaagcacgcactggcccaggtccccgtgggggctgggggactgtgggccggaagcgcaggcactgcactcccaccagcagaagggttctcacagaggtgggtcggccattctgaaactacatgcatgctggaagtgaatgaggaagtaaagacagccgagaccatcaggatgaggcctcacactcttggagaaacaaggcccacacaggagcggggagccaggctgagccccgcagtgcagcagagacctcaggcccacagggagtcaggtttccaaagcagacccagaaagcatggccgtgtgctcggggccacagcagtcgtaccagggccaccactccccacaggtggacccacacggtaatggcaaggcggagccgggtggccaagaccagctggaacatcgaggggccagtcagcaacaggagcgcacggggcagatgggcaggtggacgcacaagagggagaccaggaagagctcctgacagccaaggctggggcgactcatggcatgagaccaacgctggcgatgccgggcacctgcaggcggaaggggtggctcctgacagcacagctccagttagcggacacaggagagggagacaggcccagcgcacaggagtgactgctgcagacgagagccgtggacagcgatgcgcatggacaatgggctgagagaaacagcctcacgcagtctccacgtctcttccaagacacacacacacaccacagagggagagacttcaactcatggtggacgggcctgaccaggcctccaggtcacgtcacctatgacaccaggagcagaaggccccgcctcacgcctataggctcctgcctaagaagcatcatcgcaggccaggcctggggcctctgaccacactgctgaccgacactgcccagaagctcccagccaggagacagggcacgggagggcctgccacagcgtggacgcacggcagggtctcgtcacctccacggctcctaaggcacattcaggggaggctgggcgtgcagcaggtgcataaacctatctctgctgtttctgaacttttctgcccatctaaaatcagttcaaaattaatgatttaggccgagcgcagtggctcacacctgtaatcccagcactttgggaggctgaggcaggcggatcacaaggtcaggagtttgagaccagcctgaccaacatggtgaaaccctgtctctacagaaaatgcaaaaattagccggacgtggtggtgggcgcctgtaatcccagctactcaggaggctgaggcaggagaattgcttgaaccggggaggtggagcttgcagtgagccgacatcacgccactgcactccagcctgggtgacagagtgagactctgtcttaaaaaaaaaaaaaaatggattaaaaaatgtagcaaagtccctctagtccacagacctcactctgttcagcaccacatccaccctgcctcgacgagcccagccccccagtgagggttctgctgagatggggcccgtcggtggcagggattctgtgggccacctccaaggtgggactgatgcgagctcaagcgaatgcacagcccaggacccggcaccaccccttcctctggctcagccccagggccggcagctacagcaggagctgtgccttgggcctcaggcagcacctggcacctgggcctgcctgggtctaggtctggggggtactcaaaagaccaggcgggaggtgcacagaacattcccaggactactcagattggcaggattctagtgacttttttcccctgtattttccaaattttctacagcagtcagactagtgttatgatccattaaacgagaaaacaaaacaacaaaaagcacagaaggtcagaagatcagaaggtcttactgaggagagatcctggggcaggtttttctgaatgtcatgacccaactgccgtctctgtcttctgtggatgagcctccccggggacggctggggtcaggctcgcggggaagggaaagaccgcagaggtcaccgtgggtgcagtgcccctcgtgctccctgggagcagagctcagagcttggcagggtggggcccgagggcgcccgctcctggatcctgcacaacgtccctgacatgtcggccagcagcacagacccagcctcaccctcagggcaagctcagcagaccccgtcatcctcaccaggggggtgctgggtagctgagccaggtcagggccagcacggcgaggggcctcaggcggcctgggcccacagagccaacgcgtgtggagggcccctggctgtacctcacgccacctgcgagtttcagtgcccaggaatccccagaaggaaatggccattggtgacggcaagcctgttctgggcataacacaacacactcaagcgagacggctgcatcaaccacacagtccgctaggcacagtgtgagtggagtcgcgtggtctgggaggagactccagggaagagccagaacgccacacgctggggctggatggaccctggggggcctgagaacaggagggcaggggaggccgtgcacagctcaggccgtcaccgaggacagacgggtgggctctgcctcccccatgaggaatccctgtgcctgctgggaaagaccccagtgggtaggaggaggtgggaacccagtcaggccccgcggcccagggcagagagtgcacagggcaggcagccctcatgggaatgtgctcagagcagggccccatttggagggatctattttgggcccagacgtagcgcaaggagctgggggagtgggggtgattccgagatgtttcacctgagcctgcagaggtagggatgatgcctggggaactgggctgacagggtcaggtggaacaaggtgaggctgggggccgaggaccaagctgccccaagggagctgcagctctgctgtcccagaagcccaagggaggaggtgggggaagggactcatcgtgcaggtatggaggctcagggaacccacgcgggtccaagggagaagggggcggggcaggggcaggagacacagggggtggctctcgtgaggccgtcctggtggacggggagtggagaggggagagtgagcggcgtgaagggggagccccacacgagtgggaccggggtgcacccagggtgagggggaggtcaggagaccgaggcctggcacggaccagctggaggaaggacctcgggtctgcagaacagctgggcagcttccggcttttgcctccacagcagaagtggggctgtgtctcctcaggtggcagaaggtcgagagaggtcaagggccatgagtgggacaagacgggctggaggaagccgtgactaggggccccagacgcatcccagagagagaaggcagtggctctcccgggccccgcactcaccacggggatgtggagcttgctgagcggcttgccgtccaggaggtaggagcccgtgtaggtgacgtactcggcgtagcactggggcgcctgcggcgtgatacagcacaggatcttgcgcttctcctcgatcttcttcctgatctgcaggtattcgaagtaggggttggccctgtcgctgtggtagggctcgatggcatccagcttgatggcgtccacgatggcggccagcgtctgctggatcacctcccgcgtctgctgcgtggacgtgttcagctgctgctgcagctgctgggtggagcgctgaaagcggcgtttgcgcggatgctgggcctgggcgtcgtcgtcctcggagccgcgggccttggccctggtgaccggggcaggggtgggggcgcactccttctcggaggggggcgggccctgcttgctctggttcgcgagcatctgcgcccggttcctggtcatgcgctgagggatctcctccactcggggggccttcggggcttcggccgtgggttttggttctgcggcttccggctggatgccgccaggagggccttcggctggggcggcggcacgggaggcctcagtgtcgtcctcggggccggcaccgtctgcggcctgagcttgtgccacagtgttcggggcggggccgtcaggggcacagagggacgcggcgggggggccttcagcctcagccccctggtctccgctccccagtgggcgctgttctgggggaacgggcgcgggctccacgctggagtccggatccccacgggccctctcttccggcaccgtctccgcctccaccgcagcttctagagccacgtccagctttggctcccctgagggctcaggctcgagctctgcagggagccgggtggaggcctggtcaggaggcagtgccggcggctcctcagccactacggtggaaacatccccaccgtttatgaccccgggggcccctggaggcatctcttctggaggagcaagactttcttccacgggttccgcttcaccatctgcggcatctttagtctgcaggggaagctccggcagggagaagggccccaggtccaggtcgtcctcggggccggcgaaggcgtccgcccagggcaccggctccacctggccgaggtgagacaggccgcggctgccgtccaggaagctattttccaggggccccagagcctccacctgagccacagcggctacacaggcgggctcgggggccacgtccagcggggcttccggaagtgacttgcagttgctgaagaaggactccagcccggagggaggggcgtagggagccgcctctgaggtggagatggcggcggggacggcgtccactccgtccttgacgtcctccagccccggctcagcgacgggcagagcgtacggggcaggagaggcgggaggggcggggtacggcgcctccgaggcgctgaagggccctggggcggcagagtggagggggtccgcggggcagaaacgctttggggactcggggaatctctgtggagacttcagcaggaggtccgagcccacaggccagctcacagggttttcagaggtgcccccgatcaggctagaggcaagcgcctgctcggaggggtgggcccactcaacgggctcctcggtgatgacggcgctgaagggaccctcgtccagcggctccaggtagctgggctccggggggatgatggcggccgtcgcctgctggtcctcggaggtgtccaggtccgggggaagggccccttcgagggaaggaaccagcagctcggctctgggggaaggggaaggttttgcttgtaaacttgagaagacgccctctggagacggggtgacagtgacaacggcagccggtgggcagtgcaaagcgtcgactttgggcgacgggaggccatagtctggggagtagtaccctggcgacaagcaggcaaacttctccgcgggaaccgggggcaggggcgccctgtcttccatcgagggtggcatgggagagtcgtagctggaggcagcaggaacgctctgctgcctgaagagcttgtctccgacgctgaattcttcctcgggggtcctcctaatgtcgacagagaccgagcggtaaaggtttgtggagagaggcctggcaggagcctggctggcgttttccgaaagcccacttgaagccacggagaacctgtcgaaaaaggagggggagcaggcgctggtgggagcggtgggcacgggcgtggagtgctgcgagtcggcgcagtcgaacacgaggtccgcgtagtcatcggcgctgcaggacggggtcctgggcgtgtgcatcacctcctcgtagctggggcaggatagcaccgacgtaggggtgggcacgccagtgggccggctctggtcaggcctgggggacgcaggcaggacctctttcatgtgagggcctgccagccagtctttggagtctgcacctgatgctgggtgtagcttattttccgcggcaggtggaataggagtcgactctttgagctttttgtctttaaatggagggtccagccccggcggtttcttagcaggaatgtccagacccttcttccgcccgtcgtctgccggcttcgccttctccttgagcttggggtctccggaccggtgcctcagcttctccatttgcttcatcctctccttgtgccgcttgtggcgctcctcgatctccaggtccttctgggacagcatcctctcgaagctggtcatcatcaggtcgccgtcccccaggagcttctccctgggcctggcgtctttcttgcctgggtctttggatggcgctaccttatcattcccgttgctcatcttcactgggtcgcccttttctttctctgcaccgtccttgaatttctccttcagtttggcatcgccgagcctcgggccctcgtccctggacttgtctttgagcacgcggggcgggctgtccttgtccctggtggcgggcttctgctcgtccctgtgatgccgcaggagctcgtccctgtgatgccgcagcagcccatccgcatgcctgtcccggtgcctctccttctcgtctctccatttctccctgtgtttctctctcttcttcttctcttttaggatgttgatggcactagatccataaggctttagttccttttctattttcttggaaggttctctctcggaatcatttttatctttcttttcggtagaaaacaattcaatggttttatctagctcatcttctatgtcagctttcatgttgtaagaaactccgtaagcatccgcctccaggaagtccttttcgtactggccggagtccttcctgctaccgccctccttgtaatcttcgcccttctctttcttctcggccttctctttcttggctcgctctcggtcgtggctcttcttggatgaagatgaggagtgtctgtgcctctccttctctttcagcttctcagggaggcaggcgctctccctcggcttgtcgtctccaggtggctccgtgaaagagacctccaggaaggcagtcagccccggctcctgccctcggtccgtgaagctgtcagaggagacctcgctgattttatcgttggagtcttctctgtactcatggagagcctcttcttccaacttttcaagcaggcttttttccgcgtcggcacttctcgaggacttcctctccttggaatgttctttgtccgacttctctttgtgtttgcttttagccttgtcttcggcagcgtgcttcttttcagccttctcggggagcttctgtttatttttcttatcttgcgtggagtccactgaggctctgtccttcctgtccttgtacttttctgtggactctttatccttcttctccttgtgcttttcaaagactttctcttttttgtctctccccgcgtcggcagcccctcggtcctttctcctgtctctgggctccttgtccttctgcctctcagggtgctgcttgtcagaagacttcctgtgtctgtcggaggcataggcctcccgtccttcctccttctcctggaggccgtccgtcctcggcaagtcgctggcctctcccatcttgaacccgctccccatgcagctgtctctgtcgtcctcactctcatctgtgaagatgtctgcgatgtaccagcttttctctttgcctttcttgtcatcttttttttcagagaagtcttctgagatgatcccagggaaagccttctccttcttctctttcccttggtcgagagacgctttcctttctttgtctttgccatgtgtgtctttatgtttttccttggtatcttttttctctttaaaacatttatcaaattctttgtccttctgacatttttccaggattgatttctcacttttgtccttgtcactggatttctctttgtatctttctggttttgtcttctccttcctttccttatcggggccatccttcttctccttctctcgtgctgggtggtgccgttcccacggctccaggcccttcccaaagtcgccgtcggacttgtccttgaagccactctcgcagccacactccttcagctcctcccggtgcgcctcctcgggcttggccctgccgtccctgcgctccttgcagctctccagggcgtcctttctgtcccgcccggcctctgcggactctctcctcttcttgtccttttccgaaaggtagccagggacacttttatgcttttcggtctgctctttcctcttctcagagtttttatccaaatagtccctgtccttctttcggaagaagggctctctgtagtctcgcttctcccgggcccggctgtcccgcctcctctccttgctgtcctccttcaccgtctccaagatgagcttggccacagagtcgctcttcatgtccctgtagtctgtcactggcgagtcccagctgtcctcccctttgaaatcaaaggatgaatcggacaagtcagaaaaccaccgatctcgctgatcgtcagaaaggctaaatttggtgtcttcattctccagaaactgatttttgttacaatattcgtcaaaagcagaatcttccctataaaccttttcttttttgagtttttctttatcttctttaaaaatcttctccttctcttttgaaattttgtcctcttttaaatcattcttcttctctaattttgagggccggtcttttgatttcttctttctctcctctttgtacagtctcagtttttcttctttcggagacttttccttcagcgatctctccttttctgctttattcgaacggtctttctcttctcggaaagacctgctgatgtctttgtttgtgtctttgattctcttcagtgatttttcatctttaaagagccattctttttcttctaatttcattttgctaagtttctcttcttttttaaagtggtcgcgatcgtgctttaacacttttagcttgttttcagtggaaagatcattctctaacagtatagccttatctgacttctgcttggagtcctcatattcgtaagtaaaacttttcaacttcagctcttggctgatggaacactgtcccttctccttgtttttgtgtttgtgttttgttttatgttttttgacaactttcccctccttgtccagtttggggacagcgccctccgcgctggacaggaaggggctcttcttctccgacagggaggctcgcttcctgtgctcctgcctcttcctcactggcttcagcgattccacactggagccctcagaggagtagtcagactcgcttgtcagtctcgtccttgtggagtctgataaagaactgacctctgaccaagccggggaagaaatggttttccaattgtctgtccgccagtgcttggtgtgctggtctgtgtggctggggttctgcttctgggcggcagagctcccgtgagacgaggtggaggaggcagagagggagctgaacagggaggggtccttcagcaccagcggggaccccttgaggcagccagagctccccagagagtccctgtcatcctccccactctctgaggactcgctctccgactccgaggagcagaacttgtcgctccgctttccgaagcgaacctctctgccttttgtttctttctttcgcttctttttcactttatttttttccttctgctgcttggcattagaaggctctcgtgtcttactaccaggcaatatcgtatgtgccgagagtctcagcttctctcctgtccccacggtgacactcgcgtcctcctcgtccgacgtgtctgacaggatacgatgggacgctttctttggtgcaatcgtgttatttttagtgtaacttttaacctccattttgggtatagagataaaactattggatttcgtttcttttctgtagtcctttttcaataggtgcttgtcgtccaccggaggaaccctgtcctgctcgtcgtcctcatcaaactcatactcgtccttgacgggggccgtggccttctgtggctctgggttcttggccttgtgcttgaggcctttttcgaactcggagtccgtgttgttgccgtcgactgaactggaaggtgcgaaggatggtgcgtcttcctcttctgagctctctgttggaggtaggaagcgagaggtcacaggcaggctcaaaacagctctccccagaatggcagaggagggaggctctgcagatgtgtctgcgggaaggttcccaccctgcctctgcagagacactttgctcgactcatggaaaccagccacaggcaggaggaaaccagacagagctcagctgacagacagggctggcatcttagaatgaagactgcaggcttctcggcagtgacacacctgggcggggtctcccgcagtccagaagctcctgtaagcccccagcatccgaggaggagctgatcagaggggcaacactgtgcaaacaccacagggcagctcctaccatccctgcataaaagaacaggcagctcaggtggccgtgacttacccgtcgagctctcctcgctggaagtgtaagtgcctttgcctaacaggaggttcaccatcgtgggggagttggccactttcagcggcgtctcgcctttcctgttgctctgctgcgggttccctccgtaccgcagcagcagcttcaccacctacaagacagtaacacccgcgtcagggactgctggagaagcacaactcctctaccgttccgcataacacggcagccccttccgagaaccctggggttcgacccgagagcagcccctcacggtctgagggtgtgggagccgagcgcccagggactgcctggcgaggctctgggtgtggtgggcgaggctgtggctcctctgtgggaagggctgcagccgcgggggctcccgcacccctcctgtgctctccttcagaagggctctgcctcctttggatttttttccaccatttctccgttgccgcaagtagacgacttcccaggaatcttctcacgaaggctctcccctcccgccaacagtgagctcctcagcagagtggtgccggagtggtcgtggagggctcaggcaagaggttagggagaagagtgttatggaaagggttggggggacagaatagaggaaacaaagaccaagtttctgcaagctgctttattttttattttcatttacattagaaaataatctctcccttgcttgattttacaagggtaagggtggtcacatgactgacagagacaaccatggtgacacagctcttttcagctgttcatcaccagcaacctggatttcctatgcccagaacagcaatgcactgaactcaagtacaaattaaatttaatcccaactttagtccagtctgagattagcgcattcaaagaatctgtcataacgtttactatagactcttgtcgcccacagaatcagtttccagttcgtgtgtgacatgttctattgttgaatcagtacagagttcttatgtgtgtgagttttctatggtgactacacaaaacctcaggcttacaattgtggaggtcagaggtcaaggtgctggcagggcaggatccttcctttcctccatcatgggggctgctggcagaattcagtttcttgcagggctgggacggaggtccccagtcccagctgcttaggggccaccacactcctcggccctcctctaaggccagcagcgcaggtgcggccctcctcgggttctaacctctcctgcttctggcatctctcagactcagcaggaaaggctctcaagctttaagggcccatggggctgccctgggcctgcaagatgacctaggacaatctccccatgtgaggcactcacaaggtctgggggtcacaacacgggcatcttgggggccattatcctgcctacctcaccgtaattccagggtccttgacatttttcgtaataaaaagtttaaaagtggtaattacagaactataaagctgcatcggatgccccagccccatcaccctccagggccattcccctcacacctgccctcccctgcagcactgagcgaatcccagacactgcagagccttttccagttcacgtctctggaagagcccataaaacagaaacagtataaaccatagtgccattcattatcttacccagaagtttaacggtcatattttaacatcaaatagggactcagtgttctgagttccctgctcgtctcagagtcttcaatccaccccccaccccaccggaacaagccgtttctcaagtgagctctttaaggccaaggcactgtgggctccaggacctccagcaatggccaggctgggcttgctgcagaggagcacgacgggcaccagcagatgtggccccgtgtgacccctcagccttgctgtcctgcctgcaaccaggggctctccacggagctctgatgaagacatcagtgagacccgccgcatctccaggcagcacccctgctttccggcaggacggggctgtcaggcacaccacgacctctctcgacccccacagaggctgagacctctcagtgcccactgctcctgggccggccacaatggccactttctaaagcttgagtctatggttctgtgcactggccacacctcttggtgttacctcattccagacgagggtgggtctgccttgcaggtctaacagtcccacagtggtgacggggaccggcagcaactcctgcaggcctccttccacttggtgtaatccttcacctgctcaaatccaaccagacctacacggctagcggatacgagcctttcatagatggcacttgctgggaaacctgtgagaggccgtccaggctgacccagaaggggaaagctgggggcagacagagggcacagctcggccttgagggtgggcaaggcgaaaactcgctttcctgtgccccacatcatggaaccggctagctacggggaaacaaagctacagaaccacccagatgccaggacaggccggatgtgtgaagaacggggggatgccaaccttgtagtgcccgttgttggcagcgtcgtgcaaaggcgtgtcgtcatctaggcccttggtgttcacctccgcacctgcagccagcagctgcttcgcgacgtcgtagtagccccggttacaggcctcgtgcagcgccgtccagcctggaaacagacactcaggacgtacgttatttaatcctcagaacttccctcctgtctctggaggcagcgccctgaggatgtgctacagtgcggggacaagccaggtggggagctgccctgtagtgagggctgcagtttagggaagcaggtgctggcccagagaacccctaaattctctttactgtggcacctcgttagcacgatccatatctagcttattaaccctacggactgacaacctgcagggctaatctgcggcaatcaccctaaaagggtaggaaatcagtgaacacacagtgtagtaaacagcagcctcatcctcaccgatctggaggcgtatgtgcctttgcaaaacacggaggggaaacctcccgtgtcggaaacggaaaccaaggctgagagcctcctgaaggctgaagagctgctacagcaggagctccaggggcgcccaggctcgggctgcacgacgaaggccaccccgggcaggcagctcctggctggggagcttggagtccaccatcggacggtgtggccgcacgcatccgtggaaacagagctcggccccacggaagcacacggcactgctctagagaagtttcttttagaaaaatgctttaaaaaaaaaaggtgctaaattaggtttgggtcagacagctataaaccagggcagttggagaaatctagaaggattctacacacacgattttgctcatctgttccccttacactgtggacagacagtcctgggatatgtggaccactcatggtttgatgggggtattttatgtaaagaaagggaatattaaactctaatcatggagctcttaagcccctgggccgtatcaggtctggggaggctcgctcagttctctccgggtcccaggcaagccccaggacccagccctgtgaagtgagggagtccagtccagggtgtcgacccagccggcctcccggctcagaggtgccctctgctggagaatgcagccatgtgctagacacaccagggacaggtccctccaggggcctggagtgaggtttatggaacacagcagagtaaaatttaaaattcctcagttctcttacagataggccaggcatgggggctcacagctataatcccagcactttgggaagccaaggcgtgaggactgcttgaggccatgagttcaaaccagcctgggcaacttagtaagaccccgtctctacaaaaaataaaaaaattagccaggcatggtggcgtgcgcctgcacccggaaggctgagttgggaacatcgcttgagcccaggagttcaaagcttcagtgagtcgtgatcacgccactgcactccagcctgagcaacagagcgagaccctatctaaaaataaaaataacaataaaacccagcaaacaagtttactttgaaatactttccaagaaacactgatttcttctcagcaacagggaaccccactggagtgagtgtggctgtgaacaccccgagccctgcagagcagacgcgcaccccacgaggccacagcccatccaacccgatgggaggctcacggctccaatgggggaggctcagggctccagcggggggtaggctcagggctccaatgggggtaggctcagggctccagccgggggaggctcagggctccaatggggggaggctcagggctccagcgggggaggctcagggctccaatggggggaggctcagggctccagcgggggaggctcagggctccaattgggggaggctcagggctccaatggggggaggctcagggctccaatggggtgaggctcagggctccagcgggggaggctcagggctccaatggggggaggctcagggctccaatggggggaggctcagggctccaatggggggaggctcaggactccactgggggaggctcagggctccagtggggctctctggcccttgccaggcacagggtgcccacctgcgaagtccttgacgttgacgtctgccccctcgctgatgagctctttgatgcgccgggcgtccccgcggatggcggctcggtgcaggcgggtctctccacgctcgtttctcttgttcactttatctttggtttttgaggcagagttgggcgttcccttctgacacactgtagactgggaggggtgctttggtgttgtgtccactgcaggccaaggaggggacagatgggcattactgtggggtggtcctgctttgtccaatcttcaagagcccaggccaccatcacgaggtccctttgcacagggcttgtcctcagcacagccatgaggctgcgaccaggcagagccccttccctgcgccagggaccacccacaggccgggctcacctgggctgttggcagactcctcggccgtcatctgcatgagaagggccacctgctggcgctcggagagggggtagccggctcggattccagacagccccatgccaaacagcagcccggccttccgggtgacaggctccttcttaatcctcttccgctcagggccctgcttctctgtgaggcgggcgagggagagagggaggagagatttcatgccatggtgtcctccaaagctaggtccttacctaatgttacggagccccctgcgtccacctgacagctgacagagcagaaaggaaggtctgtgtatggggaaagcacagcggtgctgggagcattggtgccgcccacctcacctctcagcagtgactgtgagaccatttaaacacctcgttaccagcccctcaagtctgctaagcctgggcctccaccgagcatccactcactccaggcacctctcctgggcctccccagacctcgtaccacacatgaatgcggtgggacagcttagcaccggtgacctggctcacacaggacaggtctctgttcaatacacgtgtctgtaattcaattccaccttccccgtccctcctccaaacagtgcagatataaaatggcagacacagtttaaaacacatcagtaaatcaaggccaactggtcagtactgtacctttcttcttgcttctaggaacctccatctcatgccatggtgcttcgaggagcgtaccagccttgcagcaccacaacagggactgggctggaggcatctgaaggcatcaacacagagcactaacaagacacggtgtgagagctcggctgtttccacctcagcctcctcgtaacaagcacaccctgcactcatctgacccgttacagaacactcggctggcgtctaacgcaactcacgtgctgtgtcttttaaaagaggcaggaggcaggggcggggaagagaagaccccaagcaccaagagtcgggggcacagaagatgcctcctcctctgcctgaccagtgccctcctgtggatggaaatcaggggccagacacctctgaatcctcctccagctgccctgcgggttctggggttttctaggtcatggggtgaaactgcagaggtgcagcgcagaggcaaggctctgccaaggcctgactcggggaagaagggccaccaggaagacgtgggcctctgaagctctcctctgaggcacctcccttcccttccattcagcactcccaagaagcctctcttcaggacttctccctcggctggtgtttgatcctacagaggtgggagacatctctaacaacggactaactggatcccacacctgcccggtcactggaacacagaacggtcttaactagtctctcagctcagctcccagggcccgactctcttgctgttcaccaccatggtccccgtgaatgtgcccgtcgatttcctaagaggacgctgcccacccactctagttctttccaaggtatctgaggctgatttcttaggaattcggtctggggcatgctgagaatgtggattcgtatgtcctatgggacaagcctgcaggaaggcacacacctggccacatcgacctgcgtcacactcatgggcaaaaccccaagtactgcaggctgccatcgccaccaccagctagtctgtaaacagtcctcaacgcacagatctgagaaagcacttgagctttggccccagcccctcatagaacctggcaaacacggtggttggggaggcagcctcgccaccggccaatgagccccagcctacagccatcattggcgtagccacaccttagcagtgagcttgggtcacaggcgcttggctgtgggtctctgcgtgcgccccatgctttccctgcaccctccatgctgcccgggggccggccctccccaggcttgcttctcatagccacctctaaacaacagaagcaggcctgcggctgcctccctctaggaaagaggcgacgaagctgctggagaaaccccagctcccccaccgatagccctcaagtcctcctctctccaggaggggcccacactcaccgagcagctggtctgcccacagtcgcctggagaagcagctgagaacctctgcagggccctgatccccaagacctagccacgcacattcagaggcctgctccctccgtcacccagagcaggggggttaatgttttggagacacgaagccccctgagaacacgaggaaagcagaatccccgagatacacagactttgcaaagctgcacacagcacaggagactcctgggagcagacggcatctccttattccattgaccatcagaagtgaaaagcgagtgggccccacttctgtgctgcatgtggccactaggggtggacacagggaggagctggggcagagttggggttgcggagggaggagctggggcagagttggggttgcggagggaggagctggggcagagttgtggctgcggagggaggagctggggcagagttggggctgcagagcgaggaggcggggtggtgttggggctgcggagggaggagctggggcggtattggggctgcggagggaggagctggggcagagttggggctgcggagggaggagctggggcggtgttggggctgcggaggggaggaggcggggtggtattggggctgcagagggaggagctggggcagagttggggctgcggagggaggagctggggcagaggtggggctgcggagggaggagctggggcggtgttgggaggagctggggcggtgttggggctgcagtatgtttacatcccgaagtgcaggcgttgccatgctcttaagttatcaaaggaccctaggaggcgtgtgtcagaggaacaggcagaggcaaaggcgttccttagaagtcagtctttaggctggcaggccaggagcccacgctgcgtccccgctctgaggggcagcaaagagctgctttgtggcaaacagaacatgtcccactcctgcagggcggccatctcaggtgcagctcacacccaacatgtgcagaatgggcaggactcggtgcccccagagacttcctgggtgggctccagggcctgagcctcagggtcagggccacatccctcccgctccccaccaggccctccctctgcttctgctctgagctttggtgaagaaagcctgagttggcttcccttacgcggccaggacagctttacagggctggctcccagcaattcgcatggaaggtgctgccaacctcctggtgaattctggtgcctggagccaccacagggaccttgctctgccccacactcaggaaaagcttgctcccaggaagcagcaacttttcacccagctctccctgtcctgaaacaggactttttacttgtcctgacaccaaaaaagtccaatatgaaaccagatctcccaggatgccaatctctccactgtgaaacaagcacctgcagctacgagcatctacaacgcccacaacacgcgccagacaccacccaagctccggagcccagcaaacttgcacgtctgtcagctctgagacactggccactccagtggcttctggggtagagggaaagccccacccacggagcgagacccccatgtgccacagcccatggctcaacaatgcctgctctccattccaacccagcgacaccatggtctgagagcagctgagcgggtccttgacgtgcacacacacagcccgtacctgtacctgcactgtcaggcaccacacaagtgggtcccgcactgcctgcctgcctgcccctcctaccccaggcctgggatgacctggagccgtgtgcccctgagaaacgctcctctgagaggagaggctgcaaaacctgctccctgccctccacacagtgcagagcgcaggaggcgcggggtgttgtctgcaggtaagaaaagggtgagagcatctggagctacccctaggacagccagcaagttcctgtagcattctgcaaatttcctgtttctaccgtccaaatggaagccaaatacaatttctatgaattccaaatggtattcaccaagttgcaaagtggaaaactggcaagtctagggactaagtgcggctacagcaccacagacagatgtggccctgggtgcctctgaccccggggtgggggtgggagccactccacagcactcagaagcccccttccacccctgccctgcagtcggaacacggcctgcaggctctgagggctttgtgggctcaggcagcctggggctgagggcagaggtccagggagagcggtggagggtgccaggagaggctgtgtcttcccaagtcaagcatgttggcggtggcacctgtgtccgctgacctgagcctgggcggccacccacctcatctttaagaaacaaggcccgtagggcctttcttcaaaccacatccacctcgccagccctctgaggctggcagcacacctcactacccagctggccagtggaagattccacggaaccctctcctcctcagcacagagctgagacccctccatgagccccatgccccttcctggtgctggtgctgctggagcacggccttggcctggggcagcaggggccacagtggacaatgcttttgggagctggagcccacttcctgcccctgcatccagccatggcctttctgaggcagcagagactggaggcgagcgtcccgaggcaaacggcggtggcacctggctctgtgcaggtgggatgggggggatgtgacgcgcctgggggtgccctgtgctggtgggatcggagcgggggctgtgaccttcccgaggggtgctctgtgcaggtgggatcggaggggggatgcgaccttccttggggtgctctgtgcaggtgggatgtgatgtggggggcctgcaaccttcctgggggtgctctgtgcaggtgggattggggggggctgtgaaccgcctgggggtgctctgcagggagtgtcttctctatctggctgcctttttttttttttttttttttgagacaaggtcttgctctgtagccaaggatggagcacagtggcgcaatctcagctcaccgcagcctccacctcccaggctcaagcgaccctcccacttcagcctcaggagtagctgggaccacaggtgggtgtgcctctggctgcttttaacatcctccctttgctgttctgaaaacttcacgtcagagtcatatttaaatgtgtaattactgctctttctcctgcttataattcattatactttttgaatttgaggcttgtgtttttatgaaccttgaaaagccctctgctgccggcctctggagccaccgtctccctgccctgctctctcctctgccgaggtgcctgttaagctgcattctctcctccacagctccccgcttcctgcaggcttcctgtctcactttctttctgtgctccagagtctaggcaatctcttttgttagaacttccaattcaccaatactttcttatgttgtgtctaataagctacatcatctgctcactgggttttttatttcagtgattatagttttcatttccagatattccatatgccttaaaaacatctgcatgatactccatggttttaactcccctgatgaatactgtgcatttaaccatcccagcacgtgaggtccctggggctgacccctgctgaccctctcagaacagctttcttcctcaacgtcttgtaattccaaccaggctcttcgtctgtctacactctgggagccggaaggccgggatgaggaaggtgtgtctctccagggagggtttgcttttgctgtggtgggggccccagggagtgtggggcacttccagcagcataaaacagcacaaatccaaatgccagccccaccagagggcaggaatgggtcagaagtctcattggtgacctctcaaagcccctcatccctcctcagcacctgtccctcttagctggggggacagtgtctaccctgatagcccagtgtccaggaagtgtggccctctcgaggggacaagctttccgtggggtctgggcccaaagccccttcctctacctccctgggaggtctgaagctgggctccaaggcagagaccctgaggttgggccccagggacgtggaggtgtgtggcctcagctgctcatctgaacaaatgccttttgtatcaatcatttagcacctctaatttctaggcttttctagcaagagtcttttaggagacacaggccacgatactgtcaacataggaaaatgtgcaactcctgcgtcccaccgtaaaactcgaagacgtcaaaatacattcttgattctgctccacaaagggatgtttccatggcgatattttcaaacaacagaaagttcacggccgatggcggttacagctcatggaactgatgggcagggccgggtgcagctttgtagcacggctgctgctcacagattctcttccatttgactaaaaaccatgctgtccacaccaaacatctggcctcatccggatgttcaaagccatgaaatacagcacttctggccaagaagtctaaatcacagccgatctacacgaggcggatggtccacaacgccaagttcctacccgggcactgagctcaacgctcgcacaactccaaacgagggcgcaaccatattcccactgacatcctccttggggcagcaagacaagctccgaacagcctgtcctgggccaacaagagaagctggcgggcgcccgctgagcactgtgagccatcttgtggtgagactggcttctccttccaatctccaggtttctctctctttctgccttctttctgtcagttaccgtcattgatcacttaaagaaagacagggcctacccctgtctgctgcgtgacctcagccctcccgcctgccgatgggagctgggtcatctcttacgcctttcagctttggcttcttccgcagtgtatgtgaaggggtcacacagaggtaaggctgtgcgtccagcccttgcctgcacaacctccatgccttccccatctccaggccggggtggggtaggggtagggtggggtggggcggaaggaccagttccacaggaagcctgtggaggcaaacagggttatgtggcaagggtgggaaggagcagggcctgagccccatggtggtttcaccagcatccagcggtcaccatggtgaacaagaagccaggaaggaaggaagcaatgtcggcaaaagggctcagatgacaaccaaacagaacggtttcccaccctgggcctcctttccacacacacagcatcgtgggtattttaaaataaacaagatcaacgtccaaacctgcgctgaggcctgagctgtgtccgtcactcctgcagggcacaggcctgcctggccgaatgcatgggcggtgagagcacagggctggggggacccctctgtcgaggggccacagctcctcacacagcagagctttatggatgaaagggctgagaggcacagacaggctgagaaatgggcccaaagtcccacagcatggagccaggaggtagcagacggcccctgcccgcccccctcacttggctgactgctcccacggcagccaccacctttatcctgagtcccggggtcctccatcaaatcgctgagcctcgggtggtcttgtggaccccagcttgtctgtgttgtgttgacaacatgggcctggctaccggcctaagtgcacttctgaggggtgtcagggaagcctttgctgcggcttggggattacagaattttaaacagcaagaaccttccctttgctagtccaagcttccctttgtatgagaaactgcttacgtctagagaggaaaaatggttgagaaataggaggaccagagaccaatcacgcggagttcttaatcatgtgaaaatattttattttgacgtgctttttcttgagtgcctgaatgtggtggctcttagggtaaccccagaatcctcactgcggcaacaagacctggccaccaccctcacctcgaccaccacggccttcgctgcagccccactctgactccccgggggctgctcacgtgccagcacccactggccaagcatcctccggcaggacccaagtcctctgtattcagaggccgaccctgctttccagagactcacgaggtggcagagagtcaggctgtggcaggggcccctgtgtatcgaggagaggaggaagagtctgcagaggtttctagggaaggagatagtgtggaagtgactgtggctctggtcctgcctgggaggagatctacaggggaggggcctggccttgggctggccctgccctgcgtgggatctgtgccctgcgtgggatccctgccctgtgtggggtgcgtggggtctgtgccctgtgtggggtgcctgccctgtgtggggtgtgtggggtctgtgccctgtgtggggtgcctgccctgtgtgggatgcatggggtctgtgccctgtgtgaggtgcctgccctgtgtggggtgtgtggggtctgtgccctgtgtggggtgcgtggggtctgtgccctgtgtggggtgcttggggtctgtgccctgtgtgagctgcctgccccgtgtggggtgcgtggggtctgtgccctgtgtggggtgcctgccctgtgtgggatgcatggggtctgtgccctgtgtgaggtgcctgccctgtgtggggtgcgtggggtctgtgccctgtgtgggatgcctgccctgtgtggggtgcctgccctgtgtgggatgcgtggggtctgtgccttgtgtggggtgcctgccctgtgtggggtgcgtggggtctgtgccctgtgtggggtacctgccctgtgtgggctgcgtggggtctgtgccctgtgtggggtgcctgccctgtgtggggtgtgtggggtctgtaccctgtgtggggtgcgtggggtctgtgccctgtgtggggtgcctgccctgtgtgtggtgcatggggtctgtgccctgtgtgaggtgcctgccctgtgtggggtgtgtggggtctgtgccctgtgtggggtgcctgccctgtgtgggatgcgtggggtctgtgccctgtgtgaggtgcctgccctgtgtggggtgcgtggggtctgtgccctgtgtggggtgcctgccctgtgtggggtgcgtgcggtctgtgccctgtgtggggtgcctgccctgtgtggggtgcgtggggtctgtgccctgtgtggggtgcctgccctgtgtggggtgtgtggggtctgtgccctgtgtggggtgcctgacctgtgtggggtgcgtggggtctgctacacgcttggtgagaaactgcatcagggcttcccgccgtgtgttgctaacatccccacacacgtgagtgccttgggaccctcgtcaacacactgagctgaggccactggtccacggcacactgcagtgcacatgcccttcctggccagaggctcccaggggcgccatgctctccaggcacctgccccgcctgcgagcacagcctggcccctgctgcactctgctctctctgcccgctcgggtccactgcagctgagcgggtgggagaagcctcttcaacttcacacacttgtcgcctctagcactgggcaaggtctggcattcagagttccaagaagtcccacagataccagtggctaagtctgtcttccctccaggaatggggaagcaggagccgtcagaacagccgtctcctatctgaggcaccaggaacaaacatgacgtcaggaaaagactgaaggtgccaagcacctaacgctgaaggaaccagcatgtgcctggcagcactgcagagagcacaccccaggcaccagagaccagggtgtcattcacaggtcaaagcaaaataagaaaatcataatttttccccttgttccaaagaaacatccacgtgcagagggcaggcagcttcggcccatggcgctcctgacgagggctccctcgtggctgccccaggacaagcaggaccccggcggtcctaggcagggagaagcgagactcagggtcacagacgaaggcgcaggagaaacagcggggcaggaggctccccagaaccccagggaggccaggcaatgatgcacagcaacctcaaaaacattcgctggttgactgattatttatttatctattttattttttatggacagggtctcactctgtcgcccaggctggagggcagtggcgcaatcacggctcactgcagccttgacctcctagcctcaagggatcctcccgccaaagtgctggaagggtgaagggtgtgagccactgtgcctggctacttttagattttttaagttttgggaaaccttacacatataaaaaagtagacaaagtagtatcatttgaagcaaatcccagatatcatataatttaatatgaatgctttcagtgataaggctttttaaactgagaccacccttgaggtggtagaggacagacttcaaaagcagatacaagaggccccgggcagacagggcaggcagagcagggcaggcaagatgggctagaagtcccagggcaagctggtctgagagggctcggtgggcagagctgtcttggggccgggacatggcaggtgccttcccactccttgctgcacccacagcccttacagaggcctggtcctaggacgggctcttgcccagcgctctggaagacacagaggtgatgctgtcacatgctcacgtctgcctggacagcctccaggctgctgtgcagggaccacgcggatgcacagcctcggggactgctttaaactgggctgattcacaacagacagaatcacattgttcttggcaggcggcccccagccctgactaagcaccgcagaggccacatctccatggcactggaccgcgggcagggccgactcaaccctgcatctgggaggcgggaagccatccccacagcaacatggaggtctctgagggagacgtgccagcctctgccacttggacacagccaaggcatccggcacggtggtgaccctgcatccctcccaccatagcaaggggcacccacacccctccagagaggcctgactgctggggaccagagaagagtctcttgtctgtcacgtgtcagttaaccctgcaccaatgtttctcttctcatccctgctggtgtgcgcctctccctccaccccactcatttctgagcaagaacggctcctctgggggaaggaggggacgcggcgtgtgtgagagccacagcgcccagcagcctcccggcccagggtggggctgaacgcactggagttggactcgctactatttatttatttagagacggagtcttgctctgttgccaggctggagtgcaatggcgcaatcttggctcactgcaacctccacctattgggttcacgcaattctcctgcctcagcctcccgagtagctgggattacaggcacccgccgccacacctggctaatttttgtatttttagtagcgacagggtttcttcatgttggtcaggctggtctcgaactcctgaccttgtgatctgcccgcctcggcctcccaaagtactgggattacagccgtgagccaccgcgcctggctgtggacttgctactttaagagggtcctggttaaaatgcaagcttctaggataagcaacgctccacactcatacatcagaacaatcttcctaggaaatctagttttgcaacattaaacaagaagttattaaaattggccccgaaagggtgataaacacaggaggacaaatactacgtttcttaggtctttttgttacaatccttgcctggaaaattctattttcaaaatgttctttactgttttcccacctcacagggattctcacctaccctgtcctcacctaggcctgcccctcacagagtaaggacatggtgttcaacacgcagttccaggagcacccagggctgtggcagaaaatatcccagagacccacagagagcgagaatggcctcagtgggccagcacggctggcaccacgcaggcgctaaccatcaacagacagaccccggaagcttctgacaacacaacagggccctgggtgagagcttctctgcaccatgatgaaacggccaccacaaagagacctgagcagccagatggggtgggcaccaggtagccctgggaacgccaccttaccaagtgggatcattctcccaggaagcagaagcagatgcttgtctcattaaccctttcagcaacacctccagagacatcacagaaacacctcaaaggtctgaggccaactcccgcatggccactgtgcaaagagctaacagctacgtatcaacatgacggccttctacaaccaaaaccagcatggggaccaaagacggcaaacacagggtttcaggcctggactgactttctctaggcctaaagcccgagagtacacagcaccgctgggagctccagggagtcacccaggccctcccttctgggggctgaggtcccttacacaacccatccacacattctgtccactcacttccccgtgtctcccagtgttcttcctcggagctgtccgctgctgggaagaggagtcctcctgggcctgtgctggtgtccctgcagccttcctgtccccagatgtgctggcccagagacaggagccatgtgcctggcactgcacctgcccctcacttcccatctgggaaaaccagccctctctgctggcctttcactcagcagagtctccacctggctactgtgagcacatccctggagcaccccacataggacaggaggggccacaggcctgcggcagccacacaatcataaaggctgaagcttgctgagctgtgctgacaaaagctggggtgtggatcctctttactggctgtgcctgctgccgttcctcttcaacaatctccttcgtatcacgagctcttctcacctggaccacttcccccatctgctctcaagcccgcatcctggcacagcctctacgccttgtgctatggctgcattcaagaagtctcaggaagccagggacagagccgagggcctgactcagcactctcccggttcactccaggctttgtggccagcttagtgctctactgcctccaaccttccccagcagggctgtagagaagctggatgaccaggaggacaaggaggcctctggacacaagaatcaccaaagagcaagcacggccagcgcagaggcctctgggctccctgcaagcagctcaagacagaatccactgggaaggtgtcactgcagaaggcgctgaccccaccaggagcgtgtgcacatgaacacacatgggcttgcacacgggcacacaggcatgcacacatgggcacacaggcacacacgtacacatgggcacacacaggcatgcacacacacacgggcgcatacacaggcatgcacatgcacacacatgcaaacgcacacatgggcatacacacatgagcgcacatatatacaggcacacacaggcacacaaaagcatacacatactcaggcacacatgggcacacatacacgggcatagacgggcacgcatacacaggcacacatacaggcacacacatgggtacacacaagcacatacacgggcacacacatacatgggtacatacaagtacatacacacacgggcacacacacgggcatacatacaggcacacacatgagggcatgcacacagatacacgggcatgtgcacatgggcacacatacacacaggcatacacacttgggcacacactctggcacaggcacacagcacacacattcctgctctgcagcctcagaccccgcctgtgcttgggaagacctccctgcctcctgctcacttttagggctccctttggtttttactacaagcaatggagtttcttcctgtgcctttgtggccctgaggggaaccactgtctccctcccgtgtccagctgtcagaagacccacaggtgagcagccccatacctcgcccagggctggacatgcaccgggtgcatctccacgtgtgtgggacccaagagtgaagctctccaatcggccccatgggcctgagcctcgggtgcaaaggaggtggcatgtgggggcctgtgctccgcccctgctgcctcttgcctggacggcgtgcagggtgctagagtgcgtcccagtgcaaagccggaggtgcgggggccagggacgccctgcctgggctgctccgggctgcctgtggagggctgactgcaggaggggccgcgggctggtacctgtgtccgagtccttctgctccccattggcgcccgcggtgaagggcagcttccgcttgctggctcgctccctcacctccttcccgccatcgccacgctccagttttggggtcttggttagagaaactttatctttatcctagaaaagaaagggatgctttcagtcgtgatgtccaaattacattctcaagctctcaagattttgtttcatatgccaggagaagcgcatctcttatttgggcaatgaacaccctccctgcaccccagggcgtggctgtgtgaggctggtcaccgaccgcagaaccttcacccagaagcccggggtcgggctgtggctcagccctgactctggcccatttctcatcctgcgcaccggagggacgctcaggaaatcgctggtgtgtgtggagaaagcagaggagacacacacgcgctacctctcactccgcagacacgcgctacctcccactccgcagacacgcgccacctcccactccgcagacacgcgccacctcccactccgcagacacgcgccacctacctcccactccgcagacacgcgccacctcccactccgcagacacgcgccacctcccactccgcagacatgcgccacttacctcccactccgcagacacgcaccacctcccactccgcagacacgcaccacccacctcccactccgcagacacgtgccacccacctcccactccgcagacacgcgccacccacctcccactccgcagacacgcgccacccacctcccactccgcagacacgcgccacccacctcccactccgcagacacgcgccacccacctcccactccgcagacacgcgccacccacctcccactccgcagacacgcgccatctacctcccactccgcagacacgcgccacctcccactccgcagacacgccacttacctcccactccgcagacacgcaccacctcccactccgcagacacgcgccacctacctcccactccgcagacacgcgccacctacctcccactccgcagacacgcgccacctcccactccgcagacacgcgccacttacctccccctccgcagacacacgccacctacctccccctccgcagacacgtgccacctcccactccgcagacacgcgccacctacctcccactccgcagacacgcgccacttacctcccactccgcagacacgcgccacctacctcccactctgcagacacgcgccacctcccactccgcagacacgcgccacccacctcccactccgcagacacgcgccacctcccactccgcagacacgcgccacccacctcccactccgcagacacgcgccacttacctcccactccgcagacacgcgccacctcccactccgcagacacgcgccacctcccactccgcagacacgcgccacctacctcccactccgcagacacgcaccacctcccactgtgcagacacgtgccacctcccactccgcagacacgtgccacctcccactccgcagacacgcgccacccacctcccactccgcagacacgcgccacttacctcccactccgcagacacgcgccacctacctcccactccgcagacacgcgccacctcccattccacagacacgcgccacttacctcccactccgcagacacgcgccacctcccactccacagacacgcgccacctacctcccactccgcagacacgtgcgctacctcccaggagggagacggtgcgacacacacagcgcttgggacgtggggagggggacggtgcgacacacacagcgctcgggacgtggggagggggcagtgtgacacacacagcgctcgggacgtggggagggggacagtgcgacacacacagcactcgggacgtggggagggggacggtgcgacacacacactgcctttccccatcagtaagccttctttctgtaactttccctaggtaagctgccggcaaataccgtgcagtggtcagcgaagccttcagagcaccggaggcctcagctgctccagggctgagatgcccaactgttcctgggagaagcccaagcatccccagccacggtcctgcctcctgggaccctgatacatcttccagctcagtcactctgcatccaccaaacgtgcatccacccaacctgcatccaccaaacctgacagttaatctgagacatccctgagtgaccatgaaagagctttccagaacatgctgcaagctcagagtgcaactggagtcaaagagaagctgccaagcagaccggagcccacctctccagtgagacacggggacaggaggagggtgccagacgggtctctggggagacggggcctcaggaacgtaacacccaccccagcagtgcaggtccctcccgggcctccggagggttaacacccaccccagcagtgcaggtcctcccggccctcggcctgggtgcccagatgcagctcccccgccgcctggctgcagctccactgagcttttctatggccccctcggagtgcagtccccacctggaatgagataggcatcttccttggggtcggggaacgccaggaaagaatggcacacaccagcaagaagctccaatcttaaactccttcctccaagaacactcctggcccagggggtgggttccaccagacatctgaagagaggccaccatcaccctaatctcagaacctgatgagggaaagtttctaccaaacatgtgaaggttctaccaaacatgtgaagaggccaccatcaccttcatctcagaacctgatgaggggaaggttctaccaaacatgtgaaggttctacccaacatgtgaagaggccaccatcaccttcatctcagaacctgatgaggggaaggttctaccaaacatgtgaagaggccaccatcaccctcatctcagaacctgatgagggcattctatgaaaagaaaatgataaaccaacataccttatgaacatagacaggatatataaaaaaagacaacacaaatgataggaataagaatagattcgagaatgcaagacatttaaaaagcaatgtaattcaccacattaagaaaataaagaaaagaaaaccacgtgctcatgtcaacagctacagaaaaggcctgggataaaattccacactgtttgtgatgtgggaggaaagccccacactgatcaaggcctccagggagcctggacagaaggaacactgtccccaggtccacggtcaaggcaagactgcctacaggcaccacccaacaggcacttcacaaaagaaaatatccaaataagacaacgaacacctgaaaaggtgattctcatcaggaaaatgcaaatgacagccacgaggagatgcacaccagcacccccaccaggacagttgggagaagacaggccctgcagaccccagcaaacgcccgggaggctttgagggagagctgcaggtgcgtttcccatgacgtgttcacaaacaagcacaaggatgttcaaggcagttttgttcgtaatacaaaaaaaatgacacaactaaactgcccgtccaaaggcaaatgaacaattctagaatacaaatggaataccgcagggggtgcgcgccgtgagaaacgggtgcacaccatgagaacggggacgtgcagcatcaacactgagggtgagcgccatgaaaatggggtgcgcgcagtaaacacaggaggtgcgcgcagcctcgtggaggagccccgtgcatgcagtggcagatgcagcgggcaaccaaggtgggaacatctgtaccccaaagatcagccctcctctggaataagactgggctcaatccctttcttcacacatggaagcttctagaagacagcacaggaggacatgttcaccaccagaagacaagagaacacacaccacaccaccatgtgacgccaccacacgcccaaccacacagacgtcaggcccacacactgagccctggcagggatgtggattccctggtggttcttggggcacactggctcatcgacagaagagcccacaaatgctgggcatggccacagccacgaagggagagaatgccaacaggagcaaaatcctgcaagtcagacactgtggagcaactgatgtctcccacggaaatctcaacagccaaaacctaccagtggagacagaagtcagggcagaggtgacttttcgaatggggaacattactgaaggcccctagcactccggaatgttgtgtattctcatctgggtggtgattatccctggttttacagatgaaatgccagctataatgtctatctatagttcactttaaaagttcacaaatttctttttcgcttcccagctccttacacctcaacgagctgcgcaaggaaaagcacacatgggcaaggcgcctgtgtgacacgaggcttgccccgagctgcctacaacagggagcgtggcacagccaccaggaaggcggctcccatccacctgggctcagagcctgctgggcagctggggtgggacaggccctgtttcggcccctctaacctttcctcaccagcacaagaggactgtcagcaggaaccacgtgcacatgctacagaatgttctcatttcctaaatgcaaatatctccaacattaaatccaatccttaccaggcacctcctgtaaggccccactatgccccaaggaccaccagatagtgacagccatggcacaatgaccctgccgggccccaccagcctgccggccacctggcttctcctccttatgacacgaggtaggctctgcacatgtcatatgcagattccctatcacatcacgacttccactcatgggaagcacacacagaggaaagagaaagttgtagtaactgaaaaatggccacgtccagttgacaccctccccctggagctcaatctttctggtaagaatgagagtcgtgttgtccactgactgcagcacagaggtgccatccggtccttccagttccatcaccagctcagctgccttggtatccaaactgtctatgtgcggggtccgcctgtgtgtggggtgcggggtccgcctgtatgtggcatgcagggtctgcctgtgagctctcttctgttccactcacccatgggtctgtcctgctaccaagaggaagcacactacctcatgcctgtagctttagaggaagcaatgaaactacactgtctgcatcctccaattctgttctttctcaaggtggctttggttattctaggtcttttcaatttccctattaactttggaatcgtcttatgaatttctacccaaaaaagcccacagggattttggctggcattacactgaatctgtacatcaatgtggagagagatggcatccagttttgagggtttcctgatctatgaatattgtataactctgcatttaggtgtttctgaatttctctcagttctcaggaatattttgcagctttcagggtacaggttttgcagcacatcttcggtcaaatttaccccaaaataatccgtattttttatactactgcaaacatttttacaatttcagccctctattatttacgagtatttagaaatacacttctgcataatgggtttgcactggaacaccatgctacgctcactgattcttgtagcttttgtgcagatgtcttgggctttcctccatcaatgtctgtgaataaagacagtgttcctctttcctcttcagtctgactttcgtgctgcctggagtctgcaggacgatgctgactgcagtggagatggccagtgtttctttgtctgttctcaattttaggtggaaagaattcagtctttgacattaaatatgatgtcagttgcaggttttcacagatgctctctgtcaggttgaggaaattcctctctattcctagtttgcagaattttttttaaaataatgaatgtgtgttaacttttgtcaaatgtttttgctgcattagttggtatgatcacatggtgttttcagtcttataacaacttgaactgattgatattggaggttcaaccttgaattcttggaatcaaccctacttggttggtcatggtacattattcattttattttataagctgatgaattcaatttgctaaaattctttttaaaatttgtatgtttgtgttcatgagggccattggtctgtagttttcttatcctgtagtacctttgtctggctttggtatcagtatagtactaacacaacaactgtctatctagatagaaaacaagaacctctatgtttacctcacaccacatacaaaacatgaacctctacgcttacctcacaccatatacaaaacatgaacctctatgcttacctcacaccacatacaaaacatgaaaatctatgcttacctcacaccacatacaaaaattaactagaaatggatcatagacctacatctaagaactaaaactatcaaacttacagaacacaggaaaaacttctgtgaccttcgtttgccaaagataggattttaaaagagagcacgagttctagaagaaaatattaaatagaatggacctctatcttgggagttgggcaagagtgaagacatggaggctgctcagagcaccctatacaacactgtctaaggacccagagccaaggggattttcttggctttttctttcttaaagtgggaagtttttgctttattctaataatgaaaatcaggaacacagggaaggacttccacttcttttttcttccccgacacagattctcactctgtcacccaggctggagtgcggtgatgcgatctcagctcactgcagcccatgcctcccgggttcaagcaattctcctgcctcagactcctgagtagctgggattacaggcatgcaacaccatgcccagataatttttgtatttttagtagagatggggttttgccatgttggccaggctggtctcgaactcccgacctcgggtgatcctcatgcctcggcctcccaaagtgctgggatgacaggtgtgagccaccgcacctggccaggaacttccacttcttaaacgtgatgtgagaacctgaggagctcggcgttcacagcatcaggtaagcctcagtgcagacggcatgtggcagagctgagaatgcacagaatgcaaattcgctgcttcagagctaaacctccagtgggaggagatgaggacagtgtgttctacagagaggaatcacgcaggggaggggcggggcagggcggaggcagcatgcaggcatgtgaactgggtggtgggggaagcccaactgtcaggtaagcagaaatggtaggagctggcgggccacaggccgtgtgctctgagccctaagactgggaagagaagcggatccaagtccagcaagcccagcaagtctggcttcctctgtgatgctgctctatgtccttttctgccttagtgaaaagatggacagaaatcaccctctccacgagcccatgtgggcccacagcggtctcaggggtgtgtgagcccagcttcgccctcctgtgctctcgccatcagacacggcctcctgctcctcccgaagcatgcgggggagttctgggctctgttctgagtacagaccccatgccagactggctcgtgaaaccacagcctgaggtgggacacgccgaggcccagccatgcgcctcccagcttctcagctaaggtcactctggaatacttatcttgagggacgtagctcccagctccccacctgcagcactgacaaagctatcttcggggaggggcctcagaccagatgtgagtctgtaactggcacagactgggggggtttctgctgagactcgctggagggctcacatgctcagttctcaactgcagcctccatgcccatggacgccatctccagcctctcggcctccacacagctcgccaggtctcagtggggctgtgaatgtgggttcctaacaagctccagcagctcaggtgactgctcgtcggaggacacactttgagaaccaccaagtgaagctcagggggctgtgaggctgcctgtgctctgagtggcgtgcatggagcacaatgagacagggtgactgtgccatggggtggggacgacaggggacccatggggtggggacgacactgttctctgtagccctgcacacctttggatcagaacacactcaacgatgcagacacctgctggttcttcccgaggcagctcagcggttctgggattccgtggtcggcaatggtgagagaccgtctgcagaaggggccctttctctgacacgcctgccactgtgctcactggtgcagccaaagggacacgcacaagccgtcaggtcagcgcggcatcaggatgcactgcagagttgtgggctccatttccatcttccacgtatatgtcactgagatcacgattcttttggaaaaatctaaaaatatattgtttttgataacataaagctatatctggagaaaagggagtttatggtagaagactgagcagaaaccatttcagcctgtaccaggagaaggcaggtcagatgtgtgcacctgagttctggcacttggggctcacttcctccctaaggaatacagcctcttctaacagcagctgcaaccaggagtgcgtcttcccaggcattctatttcaagctactgttcaagctaagaaagctccaccaggcctgagagctccctactccctgtaatgcgtttaaaatttgtctgcctccatgaggaaaatgcctggctttactgtgagtagttggaaaaacaaacaaacaaacaaaacaggacaggctgggtgtggtagttcacgcctgtgatgcggaagctgaaggatcacttgagctcagaagcttgagaccagccttggcaacatggtaagatctcgtctctacaaaagatacaaaaatgagccgggtgtagcggtctgctcctgtggtcccagctgcaagggaggctgaagtaggaggactgcttgagcctggggcagtggggcagggtggggggttatggagggtgcagaagttgcagtgagctgagactctaccactgcactccaccctgggtgacagagtcagaccctgtctcaaaacaaacaaacaaacaacaacaacaaaaaaccacacatacaactgaacccataacacagctaccttactggaaaagcccagagtgaaatccacacatccctcacagcacacgtgtgaacagagctcgcatcgacattatcaggccagttcatcaagtctctcttctccttaaacaagagaacaactcaaagcagctgagcgcacacatcagcgctggggctgccggcaaatcaggacaccctgcctcctgcgccaacacgacctgctctctgtggctcttccggcctttctcgtctcgtgctaccctgccgagactgccttccctgcaagtccactgacacagggctccaccacgcccagcctgctggtgtgtcaagcggctcagagaaccacctcctcaataagcatatctgagacctgagccaggagagctccctctttcctccactgcttactgatcttcatcagaccaggcacagagaacaggagtgacaggtgccacctcgccatcaatgccagggccaggatctcctttccccacattccttctgcatcctacccaggccaccactaccacccttaccctaaaacctgcgggcacagaggctgggatcctctgtgaagcgcaggccaggttcactcagcagtctgttcacacagctgctccagaactccagcatcagaccctcaagggcacaacccaaatctctttgttcctagagcacaccccaggtgcagaagccaagcagccctttcacagacgttctgaggtcctgggacccccacccacatcacccgtgtgaacatgacaggtttttgatccaaacacacagctcacgcctccacactctcggggtgaaaccacaccatacacgacctctttgggagccaatgctcagtggaggcatggagcatgctgaagccgaagcttggtggcagtggcaggagctcaagaggatgggggcgaggcctgagctgtatgcaaagtattctgcacccttgcagagctggctgctccccgtgaatgctgagtcccaggacccaaccccacgagatgaggaagatgaggccagggcggcgacgtgaagctatcccaacactctgactgcttagccacagaagagcagggaccaccgggaagcgtgacctgcccttgcgcctttctgcctcactgctgaaggccgcacatcagcaccctgaccacccacctcctcaggagctcagcaggacacgcccatcacgaccaccaaaccctgactctccgtaggcttcacacacacgtgtgtccccgcctgtgagctcggcggtgtggtgctgaccaagcactggcttcagctcatccttcgctggtggctgcaagccatggaacccacccagccctgcacacggcacgaggagcttgggacagagcaagtgggagcagacacttggatgctgcccagacatcaagggtctcagagctgctgtcgtttagcacctgcacgtgtccgtattcacaaaatgcttcacgattcaccaaaaagaagtggactgagtcgccatcatgttgctgctgaggggaaggccgtcttgctggttatgttcgcgtgtggaacccctgctgagctcacaccacaccaaacccacaacatgagcagagaggctgcagcacagcagcacaggaagcagcaagaggcctcacaggtagtgacctggggaccagaaggcggcccagagcaaccggcaaccaggaacacactgaggggaccctgcccaccagggaccaccgagggtcagacaggtcacagatgaacggcctgccacactggccaagaagttaggaggagcaaggaggcacgaggatcaaaggacgacagcgacaggatggcaggagctgacacacatcctgcacagcaaggccctgcctcaccattcactccaccagacacgatactgtgcctgctgcagagacaggaagctgactcaggagacacctgacttgttgacggtcacaaagataacacatggcaaagcctgaacttgaacctggatctgtccaagttcacattcgctgggcacaccccagaactcggcgtctcccctcacagtgcaggacaggaagtctgtacttcctaacaccccagaacccagcagcacccgccaatactgcaggacaggaagtctgcaccccaggaaactgcatcaccccccacactgcaaggcaggaagtctgcacaccaggaatcagcgttaaccgcacattaataaaatgcagtggttttgattggcatcccattttcctattcacatttagaataaaccacagttggaagtaacgtggcccagcattgcttgcagtcaggatatctgaatgcctgacaggcctaacaggagccaggacagaaatcctggacttctgggggtagaaacgtgcagccacattgaggctcaggccaacttctgtacataaagctattatttaacgcttgacttcggtccccaaataacaaatacaaaaaaagcaaggccactttgggaaagatcactcctcaccaccctctccactcctggctgcagacagaggcacgaggaaagggccggagggcggagaacaggccacaggcgggcagcaccccattcccacctcatccccatctgggtgcggtgagcatgcagggctgggagggggcagcattacctttttcccagtctgcttctccaccatgtcgctgctgaggggaagctcttcctgctgtggtgctttagggcacccacccttgggcatcgtcctgctcctcacccgatcttcatttacacggccggcgcttcatcatcaaccgtctgcttcaaaagagaagacacacaattcactgaattcagaggcagctcaaaactcatccactctcacaccgcactcaacagactcagtaactagtcaaggcaggcagctgctctgatcagggctggggcccgggccaggcccaggaagggacttctcaggatacgcctcccataaaggggtcaccagcaacaggaatggcagctttgagcaggaaggagaacagagaagggtcaagcactttgtagtggcagaaagggacgcatggcctagggtgtggctgtgttctgggtggcagtcagcagcacctggatcctgggtcccacctggtacaggctacacccaaaacggtcaggcaccacaaggcagtcccttccccgcattacaggcaaggtcacaacacgcagcgcagtaccccagccctcaggtctggcaggtcatgtccacagccccagcctcacgccccactcaccacctgggaaggagctcctgtccccaccaggcctgtgctttttgcacacccagttccctaacttggtaggcaaggggtgtctctgagcgagtcccagcagctccgaggtcccaactccacgcccatggaagcagacgccccctcgggcctcaggctccagctcctgggtttcccaggaaatccgaggacacatactgtattaattgtatattatttttatttattaatcatgttttattttaggaaattttgccatcttaacaagtttctggccagggagagactgcccctctctcagggctggcaaattcctagatagccaagggctcccatgcaacccaatcaccttcttacccaagttcacgcccaggccaagccctgcctgaaaccagcgcagagccaggtaaaggaaactagaaagtgtccctacagcacaaagcctgcaagaactttccgaagcagccactcccgaactatttgctctgccccgtccctctctttctgcaggaaacccaacaggcagttgggggaggccttccccgagcccctgcttccgactcccacccccgtggtgtgaggctgcccctctgcgacacacggtgcgagcgcacttcttccttcccagcctcgtcctggtctcttctgtggcgatgccaacttccccacgccacgcctggcatggacactctcggagcatgggcctcctccctgcctgtgggccttctaggtttgttcaccatcacagccaggcctcccgggtgcactcacgagaggaatgggggacacacctacacacccacacccaaagccactgtccccccatcatgtcctcgccgcaccgtcagttagaaaacatttcatacaaatggaactgtgtgcacgtctctgccctttccgccacagcagcacctctgtgcgcgaccatgccgggagaagcagcttctgcaactcgctcccctgcatttacccatctcgctcatgcacgaagtatggcttttgaaacacgatgtgcagacccatctgtgagtggcagctccactgtgagcctctcccacctccaccccgtcagctaaaggatacgttgcatgccacctgcccctggacgcaggcttggctgagaccacaagatgcttctcctccaacaccatctcatgacctgctttgtctttctaaaataaatgataaaatcccaccaactgctgtcttggtatttaactggtacaagaacacaggtgaagttattctggagagagggacaggtcgggtcaacgtattcactgcctgacacctccacccgcggtgcaggtgagcaggtgtttccatccaccatccctgatgcctgaggccagacatattttctctctctacctgaaccaatgaattttacattctcttccaattttccaccacaaaaccggaatgtctcagcctggagaaagggcatctcagcacctgactcggaaggctgttcaagctcatggctgtctagaaactcagtggtaatgtttacaagtttaaggattatctggaattaacattttaaaaaatccagactgtctgctctcaggacggaaaaacggggccttcaccatgtagagtccaccgtcctgatcccagatgtgagtctgtggcccacggacacactcaacagctctggcgtggtcagggcgcagaccccacggcctccggacggtgtctgggccccgacagtgcggggcttatcacttcactcctgagacacctgattctcttcatgtccctagcttggtgctttgcccaggcaccttccccaatggaccagggatctgggagtccactcaggaggtggaggaagtgggtcgcacccaccaggcaaaatacttttcacggcctgcatcacagcgaacactccggggactcgggagtgttgtcccaggtgtacgctgtgttttctggagacgtttctccagccacctgcacgatgacagctaagaccatccaggccgtggcccttccaggaccctcgtgtccgcctggccttggctacaacatgttaccgatggcagcgatgtgctcgaggccctgcaaccccagcccccgcctctccatgaaccaccaccctcatcacagtcatggagatggtgacagctgagatgtcctgctgaagcatctgctggatgtggatgaagctggtttggatgtagctgccatctagcccaggctacacctcccaggacccgcctgcaggcaccaggcgtgcagcacgcggcccactctagagtctttttcaatgagagaccagatgaggacagaggctccagttgcttttgttctgttccaagacttgccatcccagtcctcccagaagctgccctggtgatgcctctggcacctttggcccccacactgccctgtgttccctccaccaggctcagggctggtcagcctcaccccttgccgtgaaatggcagagccagccgagggccgaggaaccgttactcagccgtgtcagtgacttctaccaggggctgcacggcactcaggagtcaggccaacaggctctgctgactcatgggtgttgtctgagggtgggggctgtgatgatgtccccaggcctccctggcagggctgtcacataaaacagtccttgaagctgggagtcccctctttagacagttccgcagcccctgtgccttctcatcacgatgctgcacagccgaccacacaacagaaggcaccgggtctcactcccgggggagactcttccctggaaggtgacttggctgtccctgcctagactcattttaagtgcagcctaaatctccctcatttccaagttatcaggcaaagtctattttaaactcacgacccttgaatcagcaggaaactgaaacacgcctcaggccactggggctgactcacgccctgtgctgagcggcaaggcacagccgcgggaaggtaaacgcagagccgaggggccggccagcacctggccctgaccgcccccaggccacgcattccttgttacttcacctcctggcggatggcaaccgtcccagcttcgtggactgtcagggtcaccgagagtccagggtggtgggagtcccccacacgagccactggcacactccctgaagcagaagccacggcgccaaagctgtgggctcagggaacttgcccattacctggcagccccgcatctgtgccaaaataagacacaactcagcccagcggagtggacagtgtctgcggccagctctgggatccagggccagctgatgctgggaacagccgtccttgccctgtgcctctccacactgcgagagcccctgcagcccagaggggctccacctcccctgcaatggggctcaaaagacaatccttctacggggctggcaggacagacgtgacaggaacaacgatggcctgctcctcccggaaggtggcttcaagagcactcaggaggtgacagatgctgtcaagaccggcccagggaaggcacagggcaggtttcccagcacccaccacgcgccagcgagcacagagccttcgcctgaaccatccaggcaccgcgccctccccctccgcacacacaggagcccagctgcgattccctctgctccacaggagatgcagcgagcaccaaagagccttcctccaggattaagcctgatgcagaagtggttacactgactacggcaaggtcagtttggcaaaacccccaggaatttcagcctatctggtctcttcagctgacaagagcaggcactggtggggaatccggcgctgcctctccccggcttctaggatctgagctgggccaggacaaccctgagacacctgtcgggcggggcaggactggggctgcagggcgggactgtggggaggggactgtggggcggggcctgcagggcagggtgtggggcgggagctgcggggcggggactgtggggccgggtggggagccgcagctgcggggcaggggctgcccaggagcactccttgccagaggccttggcatcaccagggagtccgtggaccatggagactcacgggtcccctcgggccttctgaacccaaacctgcattttaagcatgttctgttctgcacactaacacctgagaaggaccgtataagaaaaaacttgtaatgacacaactaatcttaaaactcacagaaaaaaaaaaagacttctttggggttgaaattcaccttcaataaagggatggaatgtaagcagagctgaccatgaacaacctgggtctgggtttgcactgcgtgggttcacttacacgcagattttcttccacctctgcctctcctgagacagcaagacccatctctcctcttcctcttcagcctcctcaacgtgaaaacccggaggacgaaagccattcgtggagacccgctgctgctgcgcgaggcttaagtctattttctcctcatgatctcagtattttcacgtctctagtttgctctaccctaacagtaagagcagaacacacataacatacaaaatgtgtgtgactggctttatgtggtcaggaaggctctggtcaacagaaggctgttagttaagtttggggaaagttaaaagttctacacaaattttcaactgcacaggaggctggcgcccccaacccctgtattgttcaagggtttgctgtaatttgtattaaaacaccaagcccccttacacctgggtgagtctctctccctgaacagatgtgacaacattaccctccgaagactcccagagagaaagagaacacttcaaattcagatttgtcttccacagtatgttgatagaacaggcctttacgtacgtcctgggcaaatgctcctctccttatgtaagttaataactccaccaaccactagtttgtgtaatgaccatttaaatatcgaatggtgcccaaggcccctgagaagggatgtgattcagcccctcccctcacgcaggcacgtggcctcagaggcccaggaggaggaagacaggaagtcagcagcagggtggaaaaggggagggaagcccttcaagggaagctctcccagaaccttcaatcccagctccaattccaaagacaggaacacactcatgactgacaggatcaaacaccaaaggcctgtttgccttgagggggacactggggagggtggggaagggggagtgaggaggagctggaagcagcagtcctgtgtggcaccaggggcttgctcccacgtcggccctgggcacagccccgcatggtgatgaggtgtggcctgcctgcagcacacggccatgctccagataccttagctttatctgaagagttcttttgtttgtttgtttgtttgtttgagacagctgtgttgcccaggctggagtgcagcggtgtgatcacagctcactgtagcctccgcctcctgggctcaagctatccgctcacttgagcctcccaagtagctgggagtacaggcccgtggcaccatgcccggctaatttctgtactttctgtggagtcgggtttcgccatgcttccgaggctggtgtctgaaggatgctttacggcaacccctgccttttccagctgagccctgccggctgttgtgcgctccgtggaaagggagaagcacggtctccagcggctgcgtcaggagtggtgccttgtgcacacctcacagggagagaagtctccaacggactgagcggaggaaaaaagaaaaaaggagaaaaggaaaaagagctgcatacctggcaggcctactgtgtgcaaagcccttgagtgacacaccctatgacccacagcactgtggcaatcccaggtatggaagagaagcaccactggcctctcacctctcaccatctcagtgggcaaggggagagcaagcagcccagggcaggggggctgagccgagggcaggggggctgagccgagggcaggggggcagagccgagggcaggggggcagagcccagggcaggggggcagagcccagggcaggggggctgagccgagggcaggggggctgagccgagggcagggggtctgagctaagggcacgggggctaagcccagggcaggggggctgagcccggggcaggggaagagccgagggacagaggccctcacaggaaccaggccctcccgcacaccgcctgacagtccacgtcagcgtctctgtccagcctccacacacccctgcacgttctgaagagccctccccaagagtccaactctctctccttcctcctcagggccgcaccagctctctctccttcccctcctcagggccacaccaactgtggggttccagctatcactctgtgcaaaggactcctaacatgggtgtcctccgtctcaccccataagccacactggccaaggccaggcaggcaccacacatcgcgaggtagaatctctttgctacggtttgaatgtttgtgtcggcccctcccctgcaccccaaaattcacaggttcaaaccaaacccccagtgtgcccagctactttttgtatttttggtagagacagggtttcaccatgttggccagggtggtctccatctcttgacctcatgatctgccggcctcggcctcccaaagtgccccacggcacaacgctctctactgcagccctgtttccactcacattttctgttatcacggcggggggtggcagcaccgagagcgcgttcagcattactggcctctgctttgcccctcagacacatgcttggtcactgggctgtggaacatacaggagccccgtgctccggaacacggaccacccgacaggagcacggacacagcagtcggggcgacgtgggtgcctcacagaagagggaaaaagccaggagggcggcacgtgggcgcaaagttctcagcttcgttagtcatcaagaaaatgcaaactaaaaccaaggtaagtgtgagggttactactgagtttcaacttgactggactaaaggatgtgtaactgttcctgggagcatcttgaggaagctgccaaaggagattcacattgagtcagtggacggggagaggccgacgaaccctccatctgggggggcatgatctcatcagctgccagcacggcagatctgcggaagcactggactggctgagtcttccagcctccatctttcttccatgctggatacttcctgccctcgaacatcagactccaagtgcttcagcttttgggttcttggacctacaccagtggtttgccaggggttcttgggccttcggccacagactgaaagctgcgctgttggcttcccgacttttgaggtttggggactcggactggcttcctggctcctcagcttgccaacagcctattgtgggacttcacctcatgactgtgtgagtcaatactcccaataaactcccctccatatatacatttatcctattagtgctgtccctctagagaaccctgactcgtacacacaagtactggtgaaggggtggagcaaaggaaactagtccactctcatcagggccaactcacgcacctggcaatctctactcatactgaacacaagtatgccctatagcccagcaatgccattctggacatacacgtccaaaagaaaagcaggtgcacagacacaagagacacgcgtgaagtgcttcatagcagtggggtttgcggcgtgccactaggatgtgagggtggaacactacacagcagaggaggcaaacacatcacaacgtaagtcaatctcacaaataatgttgaggaaccctgtctctacgaaaagtttaaaaattagccgggcactgtggtgcatgctggcggtctcagctaccagggaggctaaggcaggaggatcacttgagcccaggaggtcgaggctgcggtaagccaagatcatgccactgtactccagcccgggcgtcagagccagaccctctcccctctcccctctcctctctctctctctctctctcacacacacacacacacacacacacagagtaataatgttggggacaaaatacatgatacatttacataaatttctgaaaatagcaactacagtacttagggatgcatacttagttgacaagacatccgcgaagcgtggaaaatggctgcctggcggatggaattggaagggacggtgaaacgggttctaagtgaaggctgcggaggcgtttgctttgtggtctgctaagttgtacatttttactgggtggacgtttgggttctcagctgaagcagtctttcagaaggtgacagagataaaggccacactatgtccttgcaaggcctcagaggtgtcactgaccttttgctgcaggacctgttcttctcaggggtcttggcctcctagaggaaggagggccccatcgccctgctaggccctactgggaccctcaagggcatgagcatgacgacggagcagcttcaggcttcccagcatgtcgggcaggcctagccatgcccaatacacactgcagggcacccactgcagagtgcaacagggagcttggagcctgacaaggagacacacagctctgtgaagacgaaggggaggaggagcaaggaaaatgcttcttttacacagaaggcgccaagatacaaactaaatgtgatgaagacaaagaaaagcaggcgtgtgtgttaaaggtacaattgcacagctaaaaataatcatggccgtaaggcagggacggcagatggagggtgactcagcagatttcctccaaggcttgcgagggtggaaataaacacacggaagtgaccagcagagagaaacacgcagggaagaggaaggttagaaaggtctggggtgtcacgcaccgttgctgggaatgcagaggaggacggtctgcagaaggggacgcagccaccgccccccccaccccgctgcagaaggtgcacaccactcagcaaccacccacccactgctcaatctacccccaaattacacaaatagggccaggcacggtggctcacccctgtggtcccagctactcaggaggccaaggcaggggggtcatttgggcccaagagtttgagacccgggcaatgtagggaaacctcatctttacaaaaatatcaaaaaattaatcagtcgaggtggcacgcacctgtaatcccagctccttgggagcctgaggcaggaagaccccttgggcccaggaggtcgaggctgcagtgagctaagattgcaccactgcactccaaccttggtgacagagcaagaccctgtgtgaaaaaaacccaaaccccaaaccaaaaaaacacaaccggggcatgaaaaagtgcttggcccagagcagtgccccaaagcatctcctaagaaaggggcttaacacaaagcctgcccgccaggggctgctggtggcatccgggcacatctgcacgtggggctgacaggactaaggaggttccacagacacacgaccaggcggagacgcagagaaaagcaggtacagcaagaagtccactgggcaatgcagaggtggggaatgcagagggggaatgcagaggtggggaatgcagaggtggggaatgcagaggtgggaaatgcagaggtggggaatgcagaggttggaaatgcagaggtggggaatgcagaggttggaaatgcagagggcacctacacttctgatgacagcgaaatatgtaaggctggctcaaccatcaatcagtcaacgtcacccagcatgccaacaagctaaagaagaaacaccacataatcacaactggtacagaaaatcatttgataaaattcaaaactcacgataaaaattcctaggaaaacaggagtgtggagaaacatcctcaacacgataaaggccaactaccaagaactcaaggctgacatgatcaagagtgacgtgctgagggctgcagatggaatggcatacagggcagaaaggaagaaatggaataaaactgtctctctctgaagatggtgtaagtgtccatgtcgaaaatcacaaggaatctatcaaaaattccaagaaactttatttaatagagttcagcaaggacacagaatccaagatcaacacacaaacacctatcctatttctgcaataatcctatgaaaacaagaaataaagacagtaccatcctatttctgcatgctaccaataatcctatgaaaacaagaaatacacagtaccattctatttctacatgctagcaataatcaaataaaaacatgaaataaagacagtaccatttataggtgctccaaataaaaataaatgcttaggttcatatggaacaaaactagaaaaacctatacacattttaggaaaaaacaggagaaaatctttaggacctagggccaagagttgtcagacatggcaacaaaagcacaatccataaaagaaaaaactgataaacgacctcgacaaaattaaaaacttttgctctttgaaagacctagtttaaagagtgaaaagacaaactgcagacagggaaaaatatctgcaaatcacaagtcagatagcaggcttgtatgtagaagaaagaagtatcaaacaacaaacattaattagaaaataagagaaaacacacagacattcagaagaggtgcacgtggtgaacaagccatgaaggcactcgacatcctaagccgttagggaaacacaacttaaagccgcaatgagatattactgcacaccaatcggaacagctaaaatacaaaatactcaaggatgctggagaggatgtagaaaagctggaactctctcgcttgctgtgggaacgcaaagtggtgttgctgctctggagaacagcaaggcagccttacgaacctaagtgtgcgcttgctgccccactcaacaactgcaccccaggacatttatctgagaaaatggaacctcatgtgaacacaaagacctgtttgcgaatgttcacagaactttcactgataatagacaatggggaaaacccttcaacaggtgtcccagcggtgtcctcgaaactgggtttcattcacatcacggcatcccctcagcagtaaaagggatggctatggatacacccaagcgtatgggtgaatctgcagaggcccctgctgagtgagtggacacacccaggcgtacgggtgaatctgcagaggcccctgctgagtgagtggacacacccaggagcacgggcgaaatcagcggaggcccctgctgagtgagtggacacacccaggagcacgggcgaaatcagtggaggcccctgctgagtgagtggacatacccaggagcacgggcgaaatcagcggaggcccctgctgagtgagtggacacacccaggcgcacgggcgaatcagcggaggcccctgctgagtgagtggacatacccaggagcacgggcgaaatcagtggaggcccctgctgagtgagtggacatacccaggagcacgggcgaaatcagtggaggcccctgctgagtgagtggacatacccaggagcacgggcgaaatcagtggaggcccctgctgagtgagtggacatacccaggcgcacgggcgaatctgcagaggcccctggtgagtgagtggacgcacccaggagcacgggcgaatcagcggaggcccctgctgagtgagtgcacaaagcccacctcttaggtcactccctgtggactctactcccacggcttcctccaggacaaaaccaccaacctcggggaaacaggcggggactccgtgaggagggctcatgtctgtcggtggctgtcgaggaggctctaggaccaggtatccaggataagacgggggatctgaatcaagtctgcagggcggtcaccctgtcttccaatgtcatgttcccggccactgggcgaaggtggggaagggcacaagggatgctgctatttttgcaacttcctgtgagtctataatgatttcacagaaaaaaggaaaaaaaagggagaaaaaacacaaggggtgtaaggagactcccatgggtgatgaatagtctatacttttaggtgatggtgtttccccaacggtatacgtttcccaaaacccactgagctgtaaatttaaaatgagtgaattttatgtcaattgtaattcaataaagctgttaaaaaattaactagaaacagaaaaaaattttaattcccatagaaagaaggaataaagtaaaaaaacagtatgaggtaggaggtaagcttcctttcataaaccttgttttgtgtatttggctttggaatcatgcattttacatcatttaaaacattaaatataaaatgagactgggtgcagtgaatcccagcagtctgggaggcccaggcaggcagatcacttgaggtcaggagttcgaaaccagcctggccaacatggtgaaactctctactgaaaatacaaaaaattagccgggcatggtggtgcgtgcctgtaatcccagctacttgggaggctgaggcactgggaggcagaggctgccgtgagcagagatcacaccactgcactccagcctgggcgacagacaagagtgagaccttgtctcaaaaataaaataaaataaaataaaataaaataaaatgtaaaaacataaaattttgtttatgtattcacattaaatataaacattttaataatgtttaaaatgatttaaatatacttgaatgacattaaacatttaaaggatttaaagcattcaatataaaaatacaaaaagcaatctctacaacttcaaaaaggaagaggaagcaatacacttagctgtgtgtccggtcaggggcaggacacaaagcatttgtcaacaatgaccatgcagccaccaccacaccaggagcattcctgacagcacgcagcttctgggtgggtgggaaggctcgggagacctggctcaggatgtgagtcaggtgctaggggagccagtggagagggaggggctgcttcccaggtggccgctcgcacaccgggagggctgctgctggctctggcagaaggcccaaattccttggtgcacagacacggctgcggatgtgtggacatgtccgtggggctacgtgagggtccccgtgacgtggcagcgggtttccacagtgcagtcattgatggggtggtgtgggggggagccacggcacctctgtgacctagtatcggaagcaaggggctgcgtgagggtcctcgtgacacggcagtaggtttccccagtacagtgactggggggggggggggggggcgggggcggaggaagctgcagcatctcttgtatcggaagtcccacggcttcacttccacctcatcctgttcctcctcggcgagttccaacctctagcccacactctgcagagaacggtgctccacttctgaagggaggcagatcaaagattctgtggacactctttaaacttcccccagtggcttttgattaaaacctggtaatttgactgtacagttctagttagtgccatatgccctgaggacaaaaattaaaattttgaaaaatattataagcaaaacaccttcctttttcttgagacggagtctcactttgtcgcccaggctggagtgcaatggtgccatctcggctcactgcaacctctgcctcccaggttcaagcaattctcctgcctcagcctcctgagtagctgggactacaggtgcctgccaccatgcccggctaatttttctattttgaggagagatggggtttcgccatgttggccaggctggtctcgaactcctgacctcaggtgatctgcctgctttggattcccaaagtgctaggattacaggcatgagccactgcgcccggcctgatgaaatacattcttaatattaacttcatgtgtttctttttactctataatgaggctaatagaaaatttaaaattagatgcacagttcacatcatatatctcatggacagaacaactctatgggacagaagaccccgatctctgacaaacaggcaaaaatcccagagaaaagaacaaagggagaatttacagattaaagacttaaaagacatcaaagaatcttagtgtgtagaccctgtttggaaaccagttcaaacaaagaactgctgaagaaaatggcacatttaggaaagagccttttgataccgctgggtgtgtggtgacactgagaaagttcaaggcacccagcgattcaggagatagagatttatagatatgtatttaggtacagggtctcctctgtcgcccaggctgcagtgtaattaaataatcacagctccctacagcctcgaactcctgggttcaagggatcctcctgcctcagcctcccaaaatattggggctacaggcatgaaccaccacacctagcctgtgtgctatttttattttcatttagtctaagatacggtgatggttttgaatgttttcggcggatgcaatggtgtggactcgggtttggttccgggttaacgggctggggtggctcctgcacgtgggccccacatgctgggaaccgtcatcaccactgtgttcaccacactctctcttaagaagggcacacaaaacattcaaaaaaaatttaaaaactcagtagcatgcagtggctgatgcctctaatcccagaactttgggaggctgaggtggaagggatcattcgatcccaggagtttgagaccagactgggcaacatggcaagattccatctccatattaaaaaaaaaagataataatcttaaaagacacaattccagaagctgcagaatgtgtcacagaaatgacttccttacgtattaaagaatcctcacaataaaggatcattttacaagcagactataaacactgaaacagacaaaaaactaaaaacccaactcatgagaaacacctggtgaacgctcttcagctccgtgaagtcctgggatggcccaagcacctctggtgggctgtaccttttcagaaagaaacactgagccccccaagtccccgaggacagagatgccttacagctccacacgtccctccacaacggcagcacctgtacccgcagctctggggagaaatgacacctgcaggccaagacaaatgcaagaaaacagcctcgtctgctcactgattctcaccaacttcctctataaaatgaggacaagaacccattctcctaaaggattttgtggggattaaatgaaaaagcactatctaaatccaagttatcatcactgtaatggctttagaaaaaagcaaacgacaaacacaacgagagaggcgctgagaccaggcagggctctcctccggcagggcctggtctgcactgccctctctgaggaaagtgccccgctgccctgacctccctagtttcacacctccacacctccaaggaggttatcctggtacaactgagaaagcaagcaattcccttagaaacgtccatttctttcctttatgctcaaatgttttattactccttagggctgctttgttttttaacgcaagggtccacagttgagaacgtagttacaaactcaagaaacgagctgcaacagaacagcggggctgctccacgcttctcagccattttcccatcctgtgcacccggggaatttcacacgtggtcccccagagtgacagggaacccccagggaagaagggcccctgtggggcatgcagaaaaacgcctgccccctggtgtgaggtcacagactcagtggccaagctcaacaatgctctgggaactccagtcaaagatgcatcacaacttttgggtcatgcctaaggtcaattccagaatcattttagcatgttaaacagacactgaaaataaaacatattttattttttaaagcagctttaggttcacagcaaaattgagcatgaagtacagagggttcccctgcacccccgggctcagcatccccacgagagtggccgtttgttacagctgagacccccctggacacagcatcatcacccacaggccgcacgacctcagggtccaccgggtgctgtgcagtctatggttggacgaacgtatcctgatgtggacccaccgttgtggtatcatacagagtagtttcactgccccaggtcccccgtgttcctgctgcacaaccctccgtccctccctctccccagcccctggcgtcactgatctttgtgctgtctgcacagttttgccctttcctggatgtcagagtcggaaccctacagtgtgtagtccttggagacgggctgctttcactcaggcctggcagctcgtctgtttttagggccttgtaatagtctgtcgtctggatggaccttggttgactgatccattcaccctctgcaggacatcttggctgcttccaagttttggcaattatgaataaagccattttgtgaaagtgaaataatacagaacaggaaacattagggggcactgcacaccatcacagaaagggacggtattattctgtgagtatgttcccagtatgtgggcgtgtgttgtgaacagagagataaactactttctcaccactggaagcagtcaggacaattcaaatgctggcctaactggttaagagccctcaatctgtggtcagatatatctaagtttctcaatctataaaatacagaaataaggccaggtgcagtggctcaagcctgtaaaacaagcactttggaaggctgaggtgggtggatcacttaagcccagttcaagaccagcctgggtaacatgatgaaaccctgtgttttaaaaaaaaaaaaaaaaaaaaaaaaaaaaacagagagagagagaaagaaagaaaaaacactgttcccaagctgcgggctcaggacaatgtctgatgcctggcctagccctcatcaatggccttcacaatccctgctgactgggagtcaacccccagtgagtgtactgccaatacggccaagtttctgaagttggtgacatgtgagggtaccccaagactgaacagaaacaacctcctctcaggttctgagtgggtccagctcttcttacccctccaagcctgccattctctgaggagtcctctcttcctccactgctctgcttcctctcacaaagggggagtgtcccaccacgtccaactccaggctggcaaagtgacgagaaaacaccccacccatgtgggcagtgggcatgcggcatgctatggggccatgagaagcagccaggtgggtaggccagaccctgacccagagcaagcagagcccagcgcagtctcagccacgctccatgaggggccacatccacgagggcccaggagcaacatcccaggcacaccccagggatgagcagcacaggccgccaaccacgtcataccacactcacttgtgcaaaacaccctcaaactgcaaaaagcccacccacgtgtccaccagcagaagagcaaatgagtccaggtggcccacaacacacggggcgcacgtgtccatagacagcacactggattcgaagagccagacacgagtgtgtctgctgtggccttctgcatgcatgagggccccatggtgctgggggccaggcagacagtcaagcagcagagtggaggggaggtccaggaggagatcccacaggtacatgtgacatgagctctatcgtatgtgcacctaagatgtgtgccatttcctccacggatgttataccgcaaagaacaataaaaaacgactaacactgattgctgaccacctccccaaataactaatcaggacacaccctgatgccccatgtccggcctgtgggggcactgtggaaagcacaggaagtgagctcagtgcgtgccttccccattgtcctggcgttccatgcaggctgggagacgcgggtgacagcctcacaccacccctgttcccagaagaggccagtgcacccccaagcaggggctgcaacagggctgcacagagggctccagttccttccagcacaggaacaaatccacaccgaggcatccgtgagtcccacaggtcccagaagcatgggagcagcttgaggcctctgcattcaggggtctctgccgtcctgagcttcaggatgagtgggttcccacctagcacgcagtacgcagtgggttagggcaggtgctctccctcctctccctatgaacgctataccactcccatgaaagcctgtgcgtgctgcctcaggaccctgtagcagaacagcgagtgacgtcgctttggcagggaacctttggtttgcaaagccccgtcacacacacaagctgaggtaagatgacaagtctgtgtctctgcacctcagctgagccctcaggacacagcacatgagcgcccaggggcctgcaaacagcaaggaccaaggcatcactgaccgtgacaggccccagtgtgtgacagtgagaggccccagtgtgggttctcacaagcttgttttacggtttgacccagagagtacctgtgagtttcccctacagctggtgcttctaaagggctaggagaaacgcagggcaggatccccacacgccagcagctgactggccagacccctgcctgtgctgaggcatccgccgcaaacatgaccgtgcaacatgcttcaagatgccctgtgactctctcagatgggtcttttattagagtttctaaataaagaagtgatggccaacatcacaggaaaccttagatactattcctgccagttggtttgaaaaagctttaactgttaatttgctgatcgttttcagccacacggttttctgccatgtaatccacagaacccaggcctctggccacttgtccaggatacctctggagctcagagccactgtccttgtgggctactcaagacttgaggggttcaggcaagagccacatcaacagagctggacctggtgcctggctgggagcaggtgccggggagcagccaccaaatgcacacacgccagggcacgcaactgcccgcacctccaagattgtcgtcagacctagaggcgggtgtgcgtccacagacagcacactggattcaaagacccaggaaggaaggagtctgtttgctgtgggcttctgtggtgctagggaccaggtgaacactgaaggaggggccagacggagtccaggaggactcctgtagcaggacattgcccagatttctcacaatgtcctctacaattaagagcacaaccactgttccttctgcactggtgggaacccagcacttcaatgagacacaaggttaaagtgacgctttgtaaggacggaaagccacctgtgggcaccacaccccccgggtgggccacgacagggagcacaggcactaggagacccggcctgtcctaaaagcacgccctacaaggagtccccactctctacctatctgcttctaatgttctgactacatgagagatgataaaagggtttcaatacaagtgtaacattttaaatataaaggaatgtctttccattagaaaacaactgcaggccgggcgcggtggctcacgcctgtaatcccagcactctgggaggctgggtgcggtggctcatgcctgtaatcctagcactttaggaggccgagacaggtggattgcttgagctcaggaggtggagactagcctgggcaacatggtgaaaccctggctctaccaaaaaaaaaaaaaaaaaaaaaaaaaaaaattagccaggtgtggtggtgcacacctgcagtcccagctatttgggaggctgagatgggaggattgcttgaacctggcaggcacaggctgcagtgagttgagatcacaccactctactccaccctgggcaacagagtgagaccctgtctcaaaaaacaaaaaacaaaaaactgcaaattaaaacgccaaacgcacagattaatggaggaagccccatgcccaaatgctcccaaggaaacgtcagaaaggagaggacttcaggtggctcggaatcctccgccacgtgaccaagcccagctgagcactgggtctcattggatttgccatcagacactcacagtttttgtcactgttaaccctactgcacaatacatgaacatggtctaagcaattctttttttttttttttttttttttttttgagacagtctccctctgtcgcccaggctggagtgcagtggtgcgatctcagctcactacaagctccgcctcccgggttcacgccattctcctgcctcaacctcccgagtagctgggactacaggcgcctgccaccatgcccagataatttttttgtattttttatagtagagatggggtttcaccgtgttagccaggatggtctcaatctcctgacctcgggatccacccgcctcggcctcccaaagtgctgggattacaggcgtaagccactgtgcccggcctggtctaagcaattctaaccatgcagacaatgtgcaggtctttcctaggtggaaagcaagtttgcccaagtcgcacgagcaaggctggagtcagcaatgcctgttcctctccctctgttctctaatggtgtggtcttcagtctactgtgtgtggaatccccctctattgggaccacagctcctgggctgcaagcacctgctgagcatgagggtccagcttccaagctcactgtcccacgggtgacaagcaacacagtgacctgcctcccacatcagctggtgccagtatcatggtgactccctacacaccaggaccactgtgtcgcgctctgccactcaggagccccaggggcccccactatggccatcccaggacgccgcccgtcaggctcccaggacactgccccaagcacccagcttcagtgggtgtgctgccccgagacgcactctcactgtgccggggggtgggacctctgcagcccagcacgtccactcagtgtccatgtgctgccatgagcgccacactgtgtcctccaggatgtgggtctctgttagtccctcccctaccaagccaggacagccacctgcttacaggggtgctgacaaatactgactacctgcaaaattgaaacatgggtttgaaaagggcctgagtggaaatcctgtacttaacatacactctgttaaaaaaaaaaaaaaaaaaaaggaccaggcgctgtggctcacacctgtgtaatcccagcactttgggaggccgaggcgggcaatcacctgaggtcaggagttcaagaccagcctggccaacatgatgactgtctctactaaaaatacaaaaattagctgggcgtggtggcatgcaactgtaatcccagctacttgggaggctgagacaggagaattgcttgaacctgggaagctgaggttgcagtgagccaagatcacgccactgccctccagcctgggcagcaaagagcaacactcagtctcaaaaaaaaaaaaaaaaaaaaaaaagagcgagcttttgtagaaacaggtttaaaagaaaaaataatctctgctcttttcagcatttagaaaatcagccaggcaaaacaatcatttccctttcttagctaaaaggtttgccaaatgaatacttggagcaaaataagcctaattagtaacaaaaaaatcacccagatataaatgcgtaatttaaacccataatgaaagcacatgaggaactcctttccctcaaagtcaccaccgagggcctcactggacttaggacccaggaaggaatgatgagtccatctgctcgtgacctgagtctctaaaccaggaggacagacgtcctgggtaaccgctgatgggtgagcgttgcacccccaggatccctgtaattataggttctcaaggacaccaacaccagaatccatatcccatctagaaacttcttcctgtgatgcctgccaaaaggtccatttttcagtccattatcacaatgaaggtgaagttttgctgtttaggtcaaaatcatgcattaggcaatagaacgacctagagatgtctgaattccccctcagtacaaccaaaggagtaagagaggcccaggtttgcttgaaggcttacactagcaaacaaacaaacaaacaaacaaacaaagagaaaccaagaactgggaaagctggtcggtagcatcacacaggtcagatctgaaagccccatggtccgaggagcccatcctgccctgagtgcacgcagcgcatgtgaagagtcagatataaaggtggctctttcacaaaccatttcggaaatttagacgaaccctcaatttatttagaatgggttattatattttataatttctacacagaaaatattttctaaccatatcattttataacaaattagcaatagctaatgtttcctttaaaatttttcaagcacacagaaaaggatgaaggagaatacaaacacacatccaccatctgttcattttgccatatttgctttagaattctaacatttaaaaattacaaattacataatggttgaagccccttatataagccccaccctgctgtggctgctcctcagcgtcgatctgattttggggctaagcattcctctcggcgctttgatactcacgctacacacaagcctacaccaaagccggccgctgtctttgcaggtaacgcattggacggttcctgccgtaccttttcccttcaagttgtgctctggggtctatctgtgtggatacaggcagttctactattcttatgacaactgcagtgtgcgctcctcgttgtctgaaaaatccattctcctgttgactaacatttgttttttccaactttttgcgaatacaaacaacactaaaatgagtatttgtctgtttctttacatatctaaagtttataactagaaatggaatttctagcaagaaactgtaaaatgctttgtaaaatatctgatgaaatgtcacactgtatagtcattcacaaacatgtcatctttcacttttgattagggcagatgtcttctgttgtaatttttgttgttgttgtttttgagacggagtctcgctctgtcgcccaggctgaagtgcagtggcaccatctcggctcactgcaacctccacctcccgggttcaagcggttctcctgcagccccctgagtagctgagattacaggcatgcgccaccatgcctggctagtttttgtatttttagtagagatggggtttcacaatgttgtccaggctgatcttgaactcctgacttcaggcgatccacctgcctcggcctcccaaagtgctgggattacaggcatgagccacagcgcccagtcctgttgtaaatcttttatcaagagatcttggttagacaaggggaaacagtactttgcacatcatctttttttctaacatgattacattctacaaaaagagacaatataattaacaaatttcatttaaataaaaactataaactcaagtgctaacaggaggctgttcattggcaaaacaaaatcttggaagaggcacaagggcccagagagctctgaaaccccagaaatcacacagaaaatgtacaggtatgtggacagtcctggggagaggatgcacagcttttgcccaattctcagagagtccagacctgaaaaacgtttaggaaggcaccttttcaatgtccaaatgtgggcagtgatgtgggagtgaacatcagccaatagagtcctggacggacattctaccttccaaagcagaccagactcaccaacacacccagaaagaacatttttaaaatataaatggcttcagaatcctttaacatatgcccaggaaaaaattaataagtcataacccaagtcatgtggactgtttatatgcaatattagaaaagaaatcaaggtttccactgcgaaaagcctgaaacccacagctctgtttctaaggtgaatgagatgggtgagatccgcggagaagactggacttctgctgccatcatggcaagcagacccggtttggaaacaatgctgtgggtccatttctctctgcattaaatacaccacaggatttttcgttttaaattattaatcaggcaatcaaaccaaaaggaagcagacaatttaagttgtaacagggcaatctgcagattctcacaggttggagggataaggccccaacgtgaacagaccccaccaagcagcttcccagccttccagaaggttccagaaggcctgtgtgggctgctgggctcgtcaccttagcaacggctctaaacatatgtgcagtgacaccagctgatttctgaaagctgtaaatagaggataatggcataaaaaaaattccagattaaaggaccacccactgcctcctctcccaccccatccagcccataaatcccaccgttaacactgggagcaatgccacgtatgcaaacgtggctttaatcccctcacacacctattcatctgcataatgatatacctacaaaagcaaaataaggtccttgggttaactctctctgcacaaacgtgcacaaacaaaaagtggccaagagatggcagagtctggcacggatggaccagcccacagcagccacggcccacggcgggagtgctgcacctccacccacagcggccacggcccacggcaggagtgctgcacctccacccacagcggccacggcccacggcgggagtgctgcacctcctccacgaacagcagccacggcccatggcaggagtgctgcacctccacccacagcggccacagcccacggcgggagtgctgcacctccactgcccacagcggccacggcccacggcgggagtgctgcacctccaccgcccacagctctgcttcccaccctccacctcacaccaccatgggcacttggtcccttctctcagggcccttctagatcttggcgtctgggcctcaaagcacaacacaggtactgacaggtaggtctccaccatgagagagaaaaagatgaggtcaactgcctgggcaaaggttccaggtggaacatcaagagctgctggtgaatgagagcggcagcccaggctcagacctcagaaccagcttctatctttgaaggatgcagcccatttcacctgagagtcggaaaacgttgaactccccagagatgttgaggccttgggaagacagcattcggtccaggataaaccagcaatactctggaccaggtttgcaaagaactcgcccaacaggaacaaggcaaagcgtgaggaggaacgggcagggagaggccagcgtgaactcgctgcggcctgcgtggctctctcctagcacaccacgtgcctgagcaggatatgccttttccttatttcccctctatcatctttctgaggcattatatggaaaactgggtgaataaatccccaagtatgagctgacattcttaagagaaaaaacaaacttgatacttcatggtgtaaaaatctatttatgggccctacagaattacttctcactatagtcctcattaaaattaaatactaaatactctaaggaaacacacaattgcatgttaaaacatgaaaaacattattacagaataaccaaacttttgttccctcagagtgcctttctgtgatcgtttatgcccaactggcaaaggagtgggaaagggacggaggtgaatgaaaagaaggctcatatcccagagcccaaaacaggcatcatttacatgcttcataattccgaatttgggatgcacaaaccaataaagactatgtactcatgtctgtttgcaaatataagcgctttttaaatttttatttgagacgcagtcttgctgttgtcacccaggctggagtgcagtggtgcgatctcggctcactgcagcctcagcctcccgagtagctgggattacaggtgtgtgccaccacgcctggctcatgtttttgtatttttagtggagacggggtttcaccatgttggccaggctggtctcgaactcctgacctcaagagtgatccacccagctcggcctcccgaagtgctgggattacaggtgtgagccaccgcactgggcctgagcgcattttttaaaaagcaatacctgtgttcccaaaaacagaaaaattgacatttagttataagctccaacactttaattgcttaaactgaatttgtggcaaattatttcaaagtaaaaatcagctcagatttgtgtttttatgtgtaatctcttaaaagccagggtacacaggtattcctaacacataatgtatgtgtgagtgagtgagcgagcaaatgagacagagctcgaggtgggctggaggcatgtgagggtgcacgcgaaacacagtgcctcctcttggagttgccagaattcacctcgttcagaacctcaccccagtcagaaaacacaaggcagcaactggccggaacttggtcagtcacatccataaaccaccaattaccttcacagaccacgactaacaggtttattacagatgagtcacagctcatgttttcaaggaagggtctccaactgagcagtcaccagtgcagcctgcgtcagggcgcgcctccctccagcggtccccgcgtcgcccatgtctgacacagtttatgcttcgcaggcggtaaggctccgctcctcactcccatggaccaacagagtagggaaaacgaaggcacgttggaaactacggatcacgggctgttttgggtgtgggaaatccacccacccacactcacggccagctctgaccgactgaacccaggggcacatcacagacataaatatcggtgcaggcggccagccactcctcaagcccggccccgcccctcctgctcccagcggaagcttttggtgcaggacttcccgggcctcaatctcctcatctataggctgggaacaaaccctggagtctgtgctctgggaggagcacacacgggcaaccctggctcaggacagattcccagcccctaagtcatcactagggcttaacgatccatttcaaattacatctgcacggtgctttactttcatacgttattttatttggagcctctaacgagcctcagctaacagatggtattatttccacatggcaaacaaagagacaggagctgcaaccatccaaagacacctccttgctatgaatgcctggccaggcctccaggcaggaccagcaactccagaccccgtcagggccaacacgggccactgctgtccacacactcctagaaaatatccatctgtctgaagcgagtgacacagattttaccctcttgaggataaaataatcccatctgccaaaatgacccacaaataaaggctcctccttgtctgaacgctgcctcagcgtctgagggataagcccacaatgcaagcgtccgggaggacactccaggctgaggggcccaggaagaaagagggccagaaatgagggcaccctcatgcatgctgggagctgccgacaccttcagactgggaagaacaaagagctcccaagcacgagggcacgggagcacagcggagggcacgggagcacagcggagggccagacgtgaggccagaggcggctggagcagcagctcccacccaatagcagacgaggcgtgagactctcaaccaccttccaagttttctcttcatcttcaagagaacctcaaactgtattttccttagtttcattaccaggctccttgtagaaaataccagtgaaaaagaatggttggcagaactgaaaatctcaggaaaaagcacaaacacagcacacagcagaagcaggcgcagatgaggcaggaggaacggcaaggccaagcggtgctccagggaagcccagctcggatggtttctcaaccactccctgcttaaaaactgcttcacggcctgaaagggcactaaaatctgggagcatccaccaggaaatggaaaaggcaaactcccaacataaccacaaaaagacactgtacaatctccaaactgtaaagatggaaaaaaaaaatggagcggcaaaaaaacatattacaagccccccctccccaccccccggcaaaaggagagagagaagacccatcacgacaaacggatggaaagcactcgaccccacagagctcagtgccgacaccccccggcacctggtgccccatctggggaggctctgccctcgtgggtggacgaacgctggctgctattaagggctagcactgggaggcagtcccgtccattcctctgtccctgcagccacggaaggacgaagccccaagcacggaggcagagaccaggccctccagtggccccaggctctccaacttccagcttccagaactgtgagaaataaatttctgttctttataaatgaaccagtctcaggcattttgttacagcggcataaacaggctaagggaaaaaagtaaatggactaagaaatacaagaccaagtttgtcagattggaatggaaaaagtaatccagctggctcagcacgagctgagtgatgtttaatccatgaacaaacatttcagaaaatacacaccaggtgcatgctgtgcacaccaggtacatgctgtgcacaccaggctgggcttcctctatcaatgctaggtacagacttgaggccagaatgcattccaggaggtaaggtgagccactataatatggcaaaaagttcctttcacaagagagctaagacggtccgacatttatgcaaataaaagcctctgagtaaagaacaagaatcaacagaacaggccagacacaggctcatgcctgtaatcccagcactttgggaggccaaagcaggcggatcacttgaggtcaagagtttgagaccaggctggccaacatggaatgaccctgtctccactaacaacacaaaaaaaaaaaattagccgggcgtggtgccgggcgcttgtaatcccagctactcgggaggctgaggcaggagaatcccttgaacccaggaggtgaggttgtaatgagccaagatcacgccacggcactccagcctgggcgacagagggagaccccgtctcaggaaaaaaaaaaaaaaaaaaaagaatcaacacaacagagaaaatgcgcctcagccacggagcagatattaaagtgcctttcagtaaagaacagacaaggagacaaccctaacccagactacaagacagaagatctgaaagcaagaccaagctggagctaaacatataaaatcatccaataatcacatagaaaataacacaataatcacgcaatccatttttcaagctcccagggaacaacagtcatccaaacttgatcacacagacaactacaccacacgcctaaaaactgtgagagtcaccttctgaagtgacagtgcagttcagatgggaggatggtgaccagaaaacacagccttcaatctgggaattaagaaatgcatttctaaggatgagggaggagggaaaccagagtaggaatttcgaatattcaaaattggaaatgacagagatgctatacagcaaggtgggagatccaggtaaagtggttgttagagggaaatgtatttatatttatcgctagaagacatcccaataaagagactctaaaagttagaatacaaccaaaagaatagaagaaaaacatgagaaatgtacaaacataaacgaaacaaaaagcaaacatgtaacagagactaaacaaagtcaaaggtgagttttattttaaatgacctataaaatagagaacaagctacacgacacaataggaaagcaactagacaaaataggaaggcgcgaactgtctgcgaagcaaatggcccaatccccaaggttggtcagtagcaggaagagaaggctctgctgggcgaaaggccagctaaagggggtgactgagcacatgggctgggctcctaggcccgtggaggtgtctctcgttggtccgggcatcagaggaagcagcaagcagcttgctgaaatggaaatgtgaatgaaaacactgccacagcagcacctgggtgagggcttctttcaatctctggcagtgtagccttgacaagctgacacataagcctgactgtcgcacatgtgtgtacctgtatgtgtgtacgtgaacatgtacacataaaaagagttccgttcggccgggcacactggctcatgcctgtaatcccagcactttgagaggccaagataggcggatcacgaggtcaggagatcaagaccatcctggctagcacggtgaaaccccgtctctactaaaaaatacaaaaaaattagccgggcgtggtggcaggcgccggtagtcccagctactagggaggctgaggcaggagaatggcgtgaacctgggagatggaggttgcagcgagccaagatcacgccactgcattccagcctgggcgacagagcgagactccgtaaaaaaaaaaaaaaaaaggttctgttctccaggttgtgaaaatgtgactattttacattctatttctccttatcggtttttcctaattttctaaaatgttgagtattgcttcagtaataaaggttactttttaaaaaagaatacaaagagatgaccacaaacatctccaacattaggcatctccaacattaggaaaaacatattcagtttttcaccagtaagaatggtgtcagtcagtgggtgtttctcagaacgtcctccatcagactgaggaaactcccttctgttcttactttgcagagcactttcctcatgaataggtatgggattttgtctttttttttttgacagcatctcattccatcacccaggctggagtgaaatggcatgatctcggctcactgcagcctctacctcctgggctcaatggatcttcccacctcagcctccagggtaactgggactacaggcgcgccaccctgcccagctcatttttgtattttttgtacagatagggtttcaccatgttgcccaagctgctctgcaactcctggactcaaacagtcctcccatctcagcctcccaaaatgttgggattacaggcatgagccaccatatctggcctcaaataccattttttaaaaaaatcttcttagatgatcttacggcatttcattttccttatgtcaatatggtacactacattgatttttaaatgctaaaccaaatttgaacttctgagataaaccccgcttgctcatgaggtatcgctatcctttctatctcctataacttaaatttacatcagtattaatgtgggtgtttctctaattttggtatcaaggtgtccctgactcatagaaagactggatgtgtaccctcctctgttgtggaagggcttctatataactgactttccttattctttaaatgtatagtacaaatgaccaagtcagtcatccgggactgaaggtttctttgtgggaagggtgttaactaaaatttcaatttctttaatagatacaggactatttaagctatctatttcttcttcagtaagctgaactagtttaagtcttttgaagaatttgtctatttcatctcagctgtctaatttattggcataaagttaacaaattcccttattgtactttgaatggctataagatcacagcaatgtcccttttctcatgtccatactaaaaatttgttgcttctttttctcctgatccatttggctaaggggctaccagttttattgtctttaaaaaaaaaaaaaaaacacccagccgggcatatcacctgaaatcacgagttcaagaccagcctcgtcaacatggtgaagcctcatttctactaaaaatacaaaaactagccaggagtagtagagcgcacttgtaatcccagctactcaggaggctgaggcaggataatcgcttgaacctgggaggcggaggttacagtgagtctagatggcaccactgcactctagcctgggggacagagtaaaacactgtctcaaaaagtaaaaaaaaaaaaaaaaaaaaaaaaaaagaataataattatagtaatcaagacagtgtggtgttagcaaaagaatcgataaatagaatgatggaacagaaaagaccaaaaacaggccaggcgcagtggctcacgcctgtaatcccagcactttgggagaacacggtgaaaccccatctctactcaaaataccaaaaattagccgggcgtggtggcgggcgcctgtagtcccagctacttggaaggctgaggcaggagaatggcgtgaacccgggaggcggagcttacagtgagctgagatcgcgccactgcactccagcctgggcgacagagcgagactcatctcaaaaaagaccaaaaatagacccacataaatatatagtcaactaatttcttaacaaatgtaaagaaattgaatggcaaaataatcttttccacaaatgatgctggaaataattgaatatcctcatgcaaaaaacaaaaacctctaaccttaccttatgccatacacaaaaattatttcataattgaagtaaatatgactgaaaactatgtatcttgtagaagaaaacttgctctacgatgctggcttagagagatttcttaaagacacaaaaagcacaaagtacccaagacaaaactatgaagttggacttcatcaaactaaaaactttagctgctctaaagacactattaagaaataaaaatacaggccaaatacttgttaaaacacacacacacacacacacacacacacacacacacacacacacacacacatattcaaacaacaaatagctggtaaaggacctgtgtctagaatccataaagaactctcaaaaatcagcagacaacccgatttttagaaatgagcaaatggcagatatgaaagtgaagacacatgcttcaccaaagcaaatacatggatagtcccttccccccaccaaaaaagccacatgaaaagacaagcaacatcatttgtcactagggcactggaaattaaaaccgcaattcactagaatggctaaaatggaaaagatggactacaccatgtaacggcaaggacagagcagatggaattcccattcaacgctggtgggaacacaaaactgagtggtcactttggaaaagagtctggcaggttcttaacaagttaaacattcatgtaacatgtgaccgagaaacccagacccagaaaaggtaccacatccagccatctgatgctttgcatgcaactactcatatcagcttgactcccaacagctaaaactaggaaacaacggacatgtctataactgcttattggatgaacatgcgacatatctaccccctaaaaagctactcagtaaactactgacatacaccacagaacccagatcaatctcaaaaggaagatgaaacacaccagacacaagagtccacactcaatgattccattcatattaaattctagtaaagcaaaagctacagtgaccgaaagcacatcagcatcctgggtccaggaaataggatgacatgctgctgcaaagaggaaagggggaactttcttggggtgatggaaatactactctgtatcatgactgtgatggtgggaacaagacagttccaactgattccttaaaactctcacatctgtagtcatgagcaacatgatgctcatgttgagtgtggtcaacaggccacattcatgatggtggtatgtgctaccataagatgctaatggagtggaacgggtcccatggcataaacacctaccactgtgttacgatttctttccacgattcagcagggtgactcagcaacaggctctaccatgtagcttaggtgtgtgggaggctctgccttctggatctgggtacgcacactctgtgatgctcagaggacaagatcacctaacaacgcatttctcaggatgcatcccccgaccgctattaaaattgatgcattccaaagtatttaaactgtacctcaaagaagctctcagagagaatgcacgggagtggacgatggcgggcacaagagctcgtcaagagcactgttgtgaagaaaagcagagaggcggcggcggcagctggtggtgggcatgggcgaggggttccacggcaaagaatgaaattgaatgcccatcaccccacgcccacaggccgccaaacacatctggaaaagcagaatacattcctgaaggggatggcatccatggccctagggaaggaagaccagatcccaacaggagcaggatgaggctgtccttgatactgagcaggtggctgacttcaccacacaccctccactacctccgcaaatcactccaggcattcattacccactacaccaaataactgattctcatttcataaatatacgtattcaaagaggatcctagcgaactttttcaagaaaacactggatacagactctcgggcaggtctgtaagttaaggcatggagacgaagcttctctctgtgtttggcattgaggcaatgctgctgtgggcactgcagacataggccctgtgacctgggcgcaggttcgtgtcatgccacacagcatgcaattccatggacacaaaatgaccagaacagcagactcagagaggacgcagaggctgcagggggaacaaggagtgacgattaaaggtccaagtttctttctgaggtgacagcaatgttctagaactgacagtcctggtggttgaacagacccgtgaatacactaacaacctttgaactgtgcgctttatctgggtaagcctacggtctgtcaatcctctcaatcaagctggtattatctcttttttggagacagtctcactctgtcgcccaggatggagtgcagtggtgcgatcgtggctcactgcaatctctgcctcccaggttcaagcaattctcacgcctccgctgaaatgacaggcacaagccaccaggcccaggtaatttgtgtagaggcgggggtttcaacatgttggtcagattggtctcaaactcctgacctcaagtgatccgcctgcctcagcctcccaaatgctgggatcacaggcgtgagccattgcacctggccgattatcttctttgaaaagcatgagacacgtttccctagggatggaatgctggacacgagacaagacttgtcctaaggactggatctcacagtggccaggtatgcatcacgccacgcggtgcagagccctgggggaaggcaagtcaagaagccaggggtctaggcaccgcaatgtctcaaggcagccccccaagaaaaccaagcagaaggccacagtgacgccctcctgctctcaggtcagtggcaggagggcacttgctgatgctgggcacagaggaatgtcagggcagatcttcaaggctcacacccttcagagcttctggcaagctcaacacagtgagcgagccctgcccccaagagtgaggcccctgtcagggccacttcctctcgccctggcccatccagatctcacacacactgtggtagatctttgaagggtaaaagctctgtccgctccactcatcagcaccaaagtgttctgtgcctggcccttctccacccaattcaccagtttattgaagcctcagctgggtgagtcccgcttgcctctgaaaatgtgtgtgctcagccaggcagattcttgagtgcgtttcctatgtgctgctgccctccttcaagatgaccacatgggcccccaagcagggcccctacctgctttgtcagcatcttgtcctttccctcttttctctcacggcttgttctacttcacggcatgtttaagcaaagggggtcactacaacaaaattattttaaaacaaacatacttcagaaaagtttatggaaaacattaaaccttgaatatattaactttacaggatccatttacttcaccctaacactgagttaaaattataacaagagaaagtagggctgggcgcggtggctcacgcctgtaattaatcccagcactttgggaggccaaggcaggtggatcatgaggtcaggagttcaagaccagcctggccaatatggtgaaaccccgtctctactaaaaatacaaaaattagccgtgcatggtggcagacgcctataatcccagctactcaggaggctgaggcaggagaattgcttcaactcaggaggcggaggttgcagtgagccaagatggcgccactgcactccagcctgggtgacagagtgagactccaactccaaaaaaaaagagagagagagagagagagagaaagtaaacaaagtttctatttatttctccagaggatctcaaaagtagagctggaaataccagcagtaagaggaacaccagtccaaggcaactacaaggaactggtcactttttcatttttttgagacagagtcttactgtgtcacccaggctggagtacagtggtgcaatctcggctcactgcaacctccgccttccgggttcaagcaattctcctgcctcagcctccctagtagctgggattacaggcatgcacaaccacgcttgcctaatttctttgtatttttagtagagacagggtttcatcatgttggccaggctggtttcgaactcctgacctcagctgatccgcctgcctgggcctcccaaagtgctgggattacaggcgtgagccactacgcccgaactggtcacatatcttatggaacataatgtttttcatgatcaacagccactatgggaacacaacacacatcagccctgagacacccgaaacaagacagagcagcctctgcagcctctcatgcagggagcgtggggcatgtctgccacagggtgaggggcggcgggcagagatggagacataaaggcggagctggcttccagccttgtgaaccagcccagctgaatgccccaagtctgtaaataattgatgggagccagagcacccagccctgcagggctctcgggagctgcccgcccaacagtcccatgcctggcactccctcaggtgccgcctgcaaggtcactccactgcttctaaataatgcactgcacagatggaggaaagtatacctttacccattcaaatcttccaaggcacgcattttcacaaattttacatatatataactaaattttgcattcagccaaaaaaaaaaaaaaaaagaaaacttcatgttgaaacactgtatctcaccctagaatttgaaaagcctccttttccttctcactgtcaatcttttttgaagtctcaaaaatgattttactaacattagacaaatacccaaatataaaaagtgcttgacacagtcaacactgcagcagtgaggtccactatgccagcgcagtgcagagccagcccacctccctgcaccagtggaaatgtcacagagggcagagggcagcgtgcccagcacctgctcttgatagggagggcacttctaggctggaatactcaagagatttgattgtgtgtcatcaaagcatgctttaaatacaaaagctggcagggcacggtggctcactcttgtaatcccagcactttgggaggccgaggcaggtgaatcacctgaagtcaggagttcaagaccagcctggctaacacggtgaaaccacgtctctactaaaaatacagaaattagccgggcatggtggcgagcacctgtaatcccagctactcataagggaggctgaggcaggagaaatcgcttgaacccaggaggcggaggttgcagtgagccgagatcacacctctgcactccagcctgggagacagagtgagacactctcaaacaaacaaaggctgtgagtggcctggaagctcgttcttctagctcctttggcaaagaaaatgcccccaaaggagtgagggcaacagactttccaagtcccaggaaatgcacagattcacatgctgaagacccaccagatgcaggaaggaaacgccagaacaacatgtttgctttcatctaaaaacatcagaaaaagtctaaatgttgctgacatttcctgggcagctgccctgtggtctcccgtctggccaaggagcctcaacccagttgctcccaacatactcccatcccaggcgaacctatgctggtgatgctcgggaggcgggcagagggctcacggagggagggcggagggctcacaccctgaggctcggaaggcgggcagagggctcacaccctgaggctcggaaggcgggcggacggctcacacagacccacaaggaccaaagaggaacgtgcaggactccaacacaaacggaggacgatggcagaacagaagagctgattaagtttctgctgcttgtaccataaacttttcatcagccagactgtttgcctgaaagacctaatcaaggctgacaagaattcaaagccatttcaaagtgctcctcaggggtgaacgtggccccatgtccggcacatgctctgctctgaacgctctctcttccagcagggacggccccagacatcgagtatcacaaccaactcaaaaatagactgaaatgtcacagtatcgccaggatcaaaagaaggtctcttaaaaataaagggtttcttccattaataagtaaaacaagaaaaaacccaaagatgctcacttgaacttcatcttgttatgagcatccacccgtcgagggcaggtcttgtgttactgagcgcagcctgacaatcgcatctgcaccgaggccctgccacggcggttcacggcaagggtctgtggctctcctgtgcgcagcccaatggaaaggcagagtgaccgatgagataaacaccacaggaacagggtgctccccccagcacagctcgggagaccagggctcaggaacgctaagtgactcgcccaagaccaccagaaatgagttgggaggctgaggtgggaggatcacatgagccccgccctgggggctgaggcgacagtgagcccagatagcgcccctgcactccagcctgggcactggagtgagacttgtctcaaaacaaatacaagaaagaatctggaaaaccttagttactatgaactagtgcttttcactaacaaaacacaagtattttttaattctcacgtttctgatcatctttgtttataacatttataggttacaaacaatgaactattgtgggtttttaaaaactgattacagactttcaggacgtccaaaggagacatctttgtcaagggagtaaagtggagaattccagagacacgcacagttctcggtggcaagccatccgctgaggtgagaaggatgtgatccatcagccaaccctgcctagatgatgacaccagctccggaagccagatggagcagctggacacattcagaacagtgctttcaagcagacactgcttgttccaatgtcagctctataaagaatgtaacagggccaggcgcggtggctcacgcctataatcccagctctttgggaggccgaggcgggcggatcacgaggtcaggagatcgagaccatcctggctaacacagtaaaaccccatctctactaaaaatacaaaaaaaaaaaaaaaattagccaggcgtggtggtgggtgcctgtagtcccagctacttgggaggctgaggcaggagaatggtatgaacccgggaggccgagcttgcagtgagccaagatcgcaccactgcactctagcctgggcgacacagcaagactccgtctcaaaaaaaaaaaaaaagaaaaaagaaaaaaaaagaacgtaatggtacaattttggggaccccaaaaggataatgcacataataaacaacaaaagcctgaggcttctcccaggccctgtggctgtaatctcccggagtcccaggcatcctgctgctgggaagggccagctcccaagtgacctgtgaccatcttggaggggttggtggctgccttgtcagcagggcatgtcccaatgctaatggttcaacagccaggcttgacatcttttattctaaaaatctaccacagaatagccaaagggcagtggtggggatgaggatgagtctgtaggagggacagtgtaaggaaggtggagccatctaggggcactgctcagaggtaggctcggccagagctacaacacaccttcgaagatgagtggggttgggggcggggtgagtcagcttcaacacacccaggattcacctctcatctgtcaaatctgctgataaaagtcacaccatgaaggaagggcagtcagggactgtgctcaccacgtgtcccggggacaggacacttgctgccagtctccagcacctcacagggaaccagggggcaggtgagcttgtggagaaacaggaatcctcgtgcattgctggtgggaacatataatggtgcaactgccaaaaaaaaacagtgtgacgattcctcaacaaattacaaaaggactaagcatatgatccagcagttccccttctgggtagatatacaaaagaactgaaagcagggcccccaaaagacagttgtacttcgacgttcacagttcacacagcatggttcccaacagcaaacccgagtgtcccctggcggatgacagagaagcagaatgcgtctgcacacagcataacgcgactcagccctaacgaggaatgcctgtcacagccaatgctgcggactccactcacagggtccagggacaaacagcagctgcacaagaggaagggccctgagggaggagtctgggaggaaccactgctcatcggcaagccaatccatggccacaggacaacgctgctgaaggtactggaagccagggtgctggctgcccctttctggggacacctttcctttcttttcctatttttattgaacactgggatgaaagtaatgaaaagtagtaaatcctttcaaaacaatcagatttagttatgatgctcaatttctgaaatcaatctcttcaaatagccagtaaatgcttcctttccaaagactgaaccctcttactgctttgaacaatggaggaagtgagtgaggcaccagatgcaacttttgacccaaggacacaggtcaagctgtgacagttaacaaccagggtggctggagatgctgcacccacccacgtggctttgctagaatgccaccacgtgcgggcagacacaggccacagcccccacacctcactctggcatcagcactggtcccgcatggagctgtgccggcttgcagaagacgtagagcacacaggcgtgttccttcccttctgttggccacatcacagctgcatattcacgggagtgaacatcatctacacaacagcttccacgtttgcaaacatgcacagcttagcgaccacgtttcaaagagccacgtggataactgcctatattactggtactcaatttccaggttgggttggtaactggattgtttacaacacaaaggataactagttgagaagatggataccccgttttccatgatatcatcactacgcattgcatgcctatatcaaaacatctcatggaccccataaatacattcatctatgtactcacaaaaactttaaaaataataattaataaataaacagaatgactaagatttcaactgtttacccaggatgctgcctgcagctcatttcagtgacaacccacaagctgccctcgctggccctgtgtgctgaggacgggacatctgcacccagccctagataaccccacgtgcaaaccacttcccctgtgccgctaaaacccacatctcacatttcagttatagtttgttttttgcctgtaggttttttttttgagaatagggtctccctctgctgcccaggctggagcgcagtggtgcgatcatggctcaccacagcctcgacctcctgggctcaagtgatcctcccacttcagcctccagagcagctgggaccacaggcatgcaccaccacacctggctaattttctattttttgtaaagacaaggctatacatttcttatatatgtctaaatcgtcagtattaaacactgacagagcaaagcctttctctgcttcaaattttaatattccaaaatatataaaacatcattgtcactgtcctcatctaaaagactgattctggaagaaaaaaaaaatcaatctgaaacaagatcacggaaatgcgatctgtcccacacacaccatctttaacatgaatggtgcctccaaagaacaaatgctagatgcaaactgcttgagtatgcttctttatttttagtaaagactccagaaaatcccagagcagccatttcccatacaactcaatcgcacgtacagccctttaaaaagcagactcccagggaactgcagccagctcctggagccagccccagcagaggagcaggaagaccttccagcctgcgccaaggagcagcgcacacgtctgctgcagcccctcggcccccactgcttcgggatgcagatggcagcactgtgacctcactgtgcctacctccttgttccggccctgcagtcttgattcttcaggctaatcccacactctgagccttggctgctggccgaaactgttattaatggcacagagctgctcatttcagcttcttttaccacgaaggtagccggctgttcacctctctgcctctccacactgaagcaggaactgggtaactgtacaagaggcattttcaacggtcttcatatctgagtctcaacagccagcagaagatgtttgcattttagtctacactacattctatgtgatgcagaaagataagatagtttttattcaattcttgtgtaaaagctacaaaaccctaagaacagagagtgccatggatgccaaaatcagcatcacatagtttatatgttttttaacttttaggttcgggggcacatgtgagggtgtactacataagtaaacacatgtcggcagtgggcggggggggaggttgtacgtgttattctatcacccagtactaagcccagtacccaacagttatcttttctgctcctctccctcctcccgccctctcccctcaagtagacccccgtgtctggtgtttccttccctgtgtttttaagttcttatcatttagatcccacttgtaaagtcagaacatgtagtatttggttttctgttcctgagttagtttgctgaggctaatagcctccagctccatccatgttcccataaaagacatgatctcgttcatttttatggctatgttatcttatcttattttgtattagggatggggcttcactatgttgcccaagctggcctgaaactcctgggttcaggcaatcctctcgaattggtctcccaagtagctgggactacaggtgaacatcaccatgcccacttttccatcttcatcacttgataaacatttataatgaatgacattaaattacacatagcaaaattctgagaaactatataccacaaatcctacaaaatttaaaagattaaaaaaccatggattattgttatgtgcattagccaatgtcagtggttccaatatttactttcaccactaaaatggcacgaaagcatgaagtcgggaatgacagcattctagaagccagtgcacctgagatgaaattcatggtatgttcggaacctagaacgtcgatggtcaacactaggcagcttcatctgtcatacgtggactccctttcaaaactccaggtgtgtgtgtctgtcatgtggctatggagaggaagaggagaagaaaagatttcgattcactaaaaactcctgttaagcctccaagaaagatccaagtaatcagatacctggtcagtcacagcctctctgcatgaagcctctctgcatgtggttaagacctgcaaacctcaacagaatccacggtctcttgcccctgcactgagcctgtgtcgggacttggccactgctctgcatcaggtgagaggctccttgtctctcacatccagatggatccgatccaactcacacagtgaacgactccaaacctgggcagccctgggctccaggatcagcccaccccagcccctgctgcaatggcacctcctactctcattgtggaaacctgtcaacccaattacagacaccctggctaggcccgtacttcttcctgtaagcctgaaaccctgctcagctaccctaaaccaccacctctgcgcaccccttaggaaaccccagcagcacatcccccttcttcctcccgcagagggcctgccccaagcagcaggaaacggggtgacacaggccttccttggcctcagcacacacagaaccatcacagcgccgggggcggggggtgctgcagggacacattccagctgtgcacttctctgggggccagcacagaccactgagcatgagctgcctcattcaggccaggtgactgtcttcatcatcattcaactttgaaacttagggtttgtgccagtccacctgtttatgttccatacttacatatcccaagccattaacaagtgttttcttctttggttatgatgctacagaatcagcagaggaacatccgcatcaccagaaggctctgcaggcagcactgaggcccatcctgctgggagaatgccgctctgagggcagtgggactgccagcaaaggacacaggctcagggagaccttccactcctgctgaaacaccaatcagtagaagatcaccacccagaaatatcactttcaagcttaaggatcacaagttacaaagataaatgtctctaaggactaagggagaagtacaaagtaaaaagatttaagcttgggaaaattaaccctaaacatttaaaaacaaaacaaacaaaaaaaatccgcactctagataagaccttcaaaacagcatgcctgtcagagggacagtaaaggtcagacggggcagcaatggggtatgagctggcacagccttgcaacaccctggatgggcggccaggggcttgtgagagtggctccaggcaggaggaccctgaatttatgggagggggcaagactaaccctcaagtgctcctcagatacgtttcattaaatgcactgaaagttttgtaaaagatgcaagtttcaacatgagatacaattatttacccaatctgacatgtggcttaacaaatgtgagtggattaggggatttttgttttattcttctgaaataccaactgccttcttcttccccttctgaaacaaccactggacaaactgaacggcacatatgcttttcgggatctcagcgtaagcagctcccactgctagggatgaagagtgctcctctgtctgcctgagtgaaacctcacgacaccttgcacagcccgcagtccttgctgactggaagcagaaccaaaacctgagctggagagagtgcacgaaagttccatctagacccaaacctaaattgcacagctacagaatgaagtgaacagcactgaagccggaagggacaagactcaatcccacgtgactgaacccatgtgtccagcaccagagatactgggcggagcacacatctcagctgtgtaaaaagtagaagttcctcttcaaagactttcctccccatctaattaaaaataaatagtaacttctcttaaaagcaacatttattcaaagacctgtgctgacattcctaaatatctgctagccttaataaagaaatcaatgtactttatgttcttagctcccacaatttagcctaagtatctgccctggcatgcttatactggtcgaagcaagcattaggtcacggcctgttcctcttccttagttgaaggtgtttttacctttctcagcattccacaaattacttcctccttcctttgttctcctctgcctttgcctcttttaaaaagttctaagttgctagccaatcgggacaaatacagaatgtgaggtcccgttccagccaatggaaaccggacacagcagttggtataaaaaaaccggacacagcgtcaggttataaatgaccctggtctcctttatccggtgtactctcgtggcaaaactgctggcgagtgtaccctttctgcagaaggtataaaaaatggccttgctgaggaaattaaatttacgttcaagtgctatttctttacggcaccagggcacaagcatttcaaacagctgggaacacgcctatccctgttaaaaaaaatatacgatgtttccagataaaagaattctgatcagaaataggtaagttttcatttaaaattttttcctatactctgccttctgaagcagtctctaaattcaccctgtatttgacggtgcatgcgaatttgttatttatgcttaaatgccagccaaggagtaagattcagtctgcattaggagatatacctaatgctaaatgacgagttaatgggtgcagcacaccaacatggcacatgtatacatatgtaacaaacctgcacgttgtgcacatgtaccctaaaagtataataataataaaattaaaaaaaaaaaagattcagtcttgcaaagttttgaaatctctcaagggggaaaaaaaaccttacatagttcacaattctgagtccagaatctaggagaaaccaccaaaactttctttgcattctgtcaaattcaaacgcactctgtgtgccaagcctcactcactttatgtccaccaagcaccacacgctgcttcccgtgtatgtggcccaggcccctgtgaaacaaacacactctctgtggtagactggaagaacacgggcctgcaggttccagtcaggaagtggagtgctagccctatgcggtgactcatgcctggagcacagcacttcaggaggctgcggcaaggaggactgactgaggcaaaaagttcgagaccagcctggccatcgtggcaaaaccctgtctctacaaaaaagaaaaaaaaaattacccaggtatgatggcatacatgcctgcagtcccagcaactcaggagcctgagcaggaggacagcttgagcccgggagttggagggtgtggtgagctatcattgtgccatgccactgcattcctgcccagccgaccaagtgacacgctgatttaaaacacacacacacacacactcaatggaaggcaaaagaaaaggaagaaaaaaaagacatggagcctttctttccagccctggagcctgggtgtaccccagacttgctgggcccacgaggaccctgccacttccacctgtgccctcaggcaacatgtgggggcccacacagactgaagtatgaaatggattcagcccccatcagcctaatgcagcttcatgagtgatcccaggtatgaccagcagaaaaccaccaggcaacacaagaattaagagaactcataaatcattattttcttaagacaccatgtattgtcttacaccgcaataggtaactgaaacacatcctactcacggtaagaacaagctgaaatatggaaagttgtttgagatgctacttaaacacagatttaactccagagcagagcctttccatgtatttttcttaacctattcgccctcaaaacagcgctgagcacagcagtcagaccctaaagcagaggtgtccaatcttttgacctccctgggccacactggaagaagaactggcttgggccacacataaaatacaccaatgctaacaacagctgataagcttagaaaaaaatctcataacgtttacaaatttgtgttgggccacattcaaagctgccatgggccgcgggctggacaagcttgccctatctcacactgttccctgtcagactgtaaacactactcagaatcacacaatctcatctcggctccaagtggaagcttgctcagcaccacggccaacctgatcccactgcagatgttccaacagcctggcacgcagatggcccagggaaaagcctcatcgaatgctgaatacctgtgagatcatttcttacaaagccaaatgaacaacactatgttaattttcaaattttggcatggaaatcacattctaagacgcttcccaagctttctggaggatgctatgaattctgttttataggtaacaagtctggaagccaaaataatcaagatttaataaaatggcctcaaaagtgacaagactctccttcccttatgacagaccatgtttgctttcctttttactagatgattaactcaattctttcaacaatcctgtccagtgatgactatcttgttggctggtcagaaggggaagttccagagctggtttttgtagaaaacctcagattctttcaatcccaggccatcttatcacgtagtctaaacccttgtgtcatcacctcctgacgtttccatcagcagaggcagagctctcaccttaaagagcatgaggccaaatcactggctgcaaagcacagaacacagacatccttggccacacaagagtgagagccactgagcccaaccagggtgcaggggagcctcccagatgagaggcctgtgcttggtcccacagggtgcagccttaccgtgctgctgagacactctgcccaagaaatggctccaggattttctgaaactcgctttcaaaatatttccaagctcttatgtcttgtgtatgccttaataattgaaaaagaggtatgttcactcaagaaagggaagagcagtaagccaagtagggggccttttaccgcaattcttcctgggcagtgtctgtggaaggtggtctctccgcagaaacccaacgttttttttaactttgttttaggttcgggttgcaggtttgttacgtaggtaaacttgtgtcatcagggtttgttgaacagactatttcatcacccaggtgttaagcccagtacccaacagttattttttctgttcctctccctcctccacccccaaccctcaagcagaccccagtgtctgctggtccctctctgtgtccacgtgttctcatcatttcgttcccattcataagtgacaacacgcagtatttggttttctgtccctgcattggtttgttaaggataagggcctccaggctctatccatgttccacaaaagacatgatctgatcacttgaacctggaaggtggaggttgcagtgagctaaaatggcgccactgcactctagcctgggtgacaaagtgagactccatctcaaaaaaaaaaaaaaaaaaaaaagacatgatctcattctttttcatggctgcacagtattccacggtgtatatgcaccacattttctttatccaatccgtcactgatagatgctcatgtggattccatgtcttcttctgtgaatggtgctgcaatggacattcgcccgcatgtgtctttatggtagaatggtttctattcctctgggtatatacccagtaatgagactgctgggtcaaatggtagttctggttttagctcttagaggaatcgccatactgctttccacagggttgaactaatttacactcctgccaacagtgtataagtgctccctttaatccacagactcgccagcatctgttattttttaaccttttcgtaacagccatgctgactggtgtgagatggtgtctcgctgtgagaaacccagttttcacgatcagctggtttccactcgctgaaatcagcagactcttgttgaaaaggctgccatcttgccttggctaacccgagctgtttcctgtatctgtcatgagggtgctgagacatgtctagacagaggtgcggcacagtcaactggacaccatccatgacttggccctaacaaagcagctctcttgaatgtgtgctatgggtacaccaagtcccacttccgggggcacccagggcaggggtcagcaaaggctttctggaagggtccagatgacacacactttgggctttgcaagccactcacggcctctgtcacatcatcctgttgctgctgtgaacgaccctttaagaatgtgaagaccatccttcgcaatctggttgtacaaagacagacccacaggctggattaggtccgctgattgtggtttgccagcccctggcctggagctttgccagtgtgcaggctggatgcccagccacggctccttctgctaggacgacctctcctctatgacagactccaagatgccaccccgagactcaccggatactcactacctcaactctccaccccgcacccatcggtgaggaagagcaggcacctcagggggacagtccatacatcccccttcgtgtttcccatcgaaacacaacagtccactccacgtgggagttcagcgttctctcaggggtgggtagagcgccgctccagactcctgccgcaggggccagtgctggcccagcagtaccgggagcccctcctcctgagcacagtggcggcgcccagagcggcagacctcccaccactgcttccactggggaaaggccggggatgctcaacgcaaccttagccggcaactcaggggagagacgctctcaaacgaccgggagtctcaggggagcgacgctctcaaacaacccggagtgtacagctgccatggtcacccacgctccctcttaggccacggcacacaccagtccctgccgcctgctcccctctaccctgttcctgacccgtccctcctcagcctgacaagtccacattgcttgggggcctctataaatcctccatggcacaaaacctcccttgaccaggaaagctcccaaaggctccaagcagcaacagctgcaggttttttgcagattggtgagtacagctccacgcatcccatcctgactacccccagcggctgcatgtccacctgctgctgcctcttgcaaactatgacttgttcaaaagcaggtggggagcctgggcaacatggcgaaaccctgtctctacaaaaaacaaaaatcagtcaggcacggtggtgtgcttgtggtaccggctactccagaggctgaggtgggaggatcacttgagcccaggaggtcaagtctgcagtgagccatgactgcaccactgcactccagtgtgggtgacagaacaagactcactctctcaaaacaaaaaacaaaaaaagaaattgtccttgcaaccaactgctgtgctccgtttatctgaaaaccctgtttatctgatttctagtcctgttcacagtgctcactacgctactcattggtttaaaaaataagtcctacatcaaaccagattccaacaattccaacatactctgtccactcttaacatgttttcgagctttttttttttgatacagattcttgctctgttgcccaggccagactgcagtggcacaatctcggctcactgcaacctccgcctcccaggttacaagcgattctcctgccatagcctcctgaatagctgggattacaggtgcctgctgccgtgcctggctaatttttgtgtttttttttttttttttttttttttttttttagtagagatggggtttcaccatcttggccaggctggtctcgaactcctgacctcgtgatccacctgcctcggcctccgaagtgctgggattacaggcatgagccaccgcgcccagcccagagcttcttttgtgcagcattttctcttgctctcaatttaatttcttgctctaagggaaaagacagcaataaaaacacgcagctcttaaaaaaaaaaaaaaaagggctgggtgccatggctcacatctgtaatcccaacattttgggaggctgaagtgctataattgcttcagcccaggagctcaagaccagcctaggcaacacagtgagaccagtttctaaaaaaatacaaaaattagtcaggtgtggtggtgcacgcctgtggtttcagctactccagaggcaggcgggatcgcttgagccaggaggttgacgccacagtgagtcctgaccaagccactgcactcaaatctaggggaggagaaagactctgtttccaaaaatttaaaaaatgggcacacagaacaaagaggcagtgggactctaagagaaggtcttcgtgctcgcctggagggaacaagggttgcatagagacttgggagtcaaccaagatgtaagcagcagactgagagaccccccactggcacccattcctccacagcaagcccacagctgccctacaatgatcacatcactaccaagctctggcctgacaatctaccctagaaaggaccaaccacaccagatcacagcataagcaccccaaacccaagaagttttcccaagagagaatatgaaacaataatcttcaaagggctggtctccaaacaaaaggcagtgcagcgacctacacctaggtacgcccgagaaatgcccacacgtctccacgacactcgcaggtctgtgttcacagcagcgctgcaaagggccaaacagagaccattcaggtgtccatcagctgatgggtgcatgacccgcatgaccctgccacagggagggctgtgctctgatgcctgctgcagcaagggtgcgcctccacggcaccaagctctgccgcagcatgggtgcgccgcaacagcacaaagctctgccgtatcagacacaaaggcccacagattgtccttcacatgaacgtctggaataggcagataaatccacagacagaaaacaagactagtggttgccagggtggaaagaggatcctggaaagggagggggtgcggtcacagaaggacaaccaggggggtccttgtggtgacgcaagggttttaaggtcccgactgtgggacacaggcatctgcatctgtgatcaactgtacagaactcaataccctttccaagtaagggtgaaacagctgtctaagaccagagggtttcatcaatgccgatatacaccctaggggtgatactgttcagtgtgcaaaatgccaccactggggaagcttggcaatgtgtacaagggactgctccctgttctttcttacatctcatgtcatctatggttatctcagaagaaaacaaacaaaaaccaaacacggggggcccagcccacctcaaaccccagctgcaggatggaagctcagagaggctgggggcctggccccttcaggaagagccaggccaagaccatccagtaacgagaacgcaaaccttctggcttcagagctctcactgaggaagaatctcaggcatggcaggaagaagacacactgctgttcaactggaaaaggatcagactcagtaaaatgctctttgcattcttccccacgcccctccctgccctggagctggggtggagctgcttcttctcaggactcaggcgaggggagcccatgtccaggggtggccagcctgcactttagtgtgggcctgtgcccaactatgtggcagctctgaggatgagaagatgtttctggaaggagctgtgagccacagtgcagtccagaaggggagacaggcgtgcccggtacctgccccagccacaccctgggcccagttaggatcctacaggatcctgagccctcctgccgttatccagggcaaagatggcaaatggctcctgcaagatgacacccagggccttgaggcaaattcccccaaccaagcaaagagaagaccagaggctggagcacacctcctgctgatggaaacagcccagcagcgaccacagggccttccaggcagctcagcgtcaccgcacacatttgacaaatgaccgactgaagcctaggacgcccaggtgagctcagcatcctcccctgacctgcacccacctggccttgttcctccacggcaggacccgagagcagaagggagctttcatcacggtgactgctgtgctgggaaaggtttccatgatgctggtcagaggcagccgaagatggcagcaacctccctgctgatgtcagccccagacgacccccaggccggctcctgagtgctcagtacagcagcctctcaaaaggccaagcctccattcaccccacggcactcaacacacccaagaacagaaccctgcaggcgccacgagacgcccaagaaccaagccctgcggacaccacgagacaaccctagggctccgtcccttgcttgagctctcctagttgagaaaaatgtgtttggcaatgttatagctgccccgtctcatgacgaaggggacttgttcaggtgagaaacgttcaactgcgcgctcgcttactgaaaaccgccgagggggaagacgggacgagcgtcttgactttcagggtgcacgtaagtggctggtcccaccaaggaagtgccagaaaaagatgcaacgactctcactacctcccaacactttcgcaaatactcactgaagaaaggccacctacacagagaggcaggttcagcatgacaccactaggcaattctcacagaacagaaacaaataaagaataagaaagagatgacagacaagcaccgccagtgtccattctaccatttggtgtcgttttatgtcatttaaatcaagtcattccctgcacagacaggtgtccagctgctcggtgcatggaggccagagccacagaaggggccgctgacgccagcagcttctctctggtgcccaggctatgtggtctgtagtctgtgcaccacccacagatgagttctctcaaggaccagctcagattccgccatgctgcaggaaggtccaggcaggcgccgctccccacattcaagggtgctgtgcactccctgcccacatgacgacacccaaggaggggtgtggagggcgatgcagactcccccctgcaccccctcaggatgactagatggatatgagaggtggtctcgggtgtggagggcgatgcggactccctcctgcaccccctcaggatgacggagaggagaggtggtctccatcaaggccacgccctctgcccaggccagcaatgtccatcatgttcctgagcaaaccgagctcttccacaggaggaaagggaggtagacctggtgaccgtgtgactccactggcatcaagaggaactctactgactggcctgttacagaacaggaggctgctccatagaaatcagctggaagaaagaacccacagaggctctaaagatgggaccggtttgtcacgggccaagaacatggtgaagccaggactgagcactcacactgaaaccagtgggtccccaggtggactgaggaaccacaaggaccaccacggcgggcacccggccctcgcatgcacacacgggcaactttacaacctggcctgggaagaaggaccggcgcccactcccaggaggaaaagcagcggcagcgcacggcaagatggatcctgacactcagagctggggaaagagccacacgtcctcctgcagcccgagcctctcactgagattaagaggggctctggggcaggcggaggcggcggcagcgcccagcgacggatgcggccaccactgcagggcctgccgccggtgtggagagcccgagtcacggagccccatgctgcccctcacagcacggacggggtcgacaaggcagtggcaggcggagtgagaggcggctcagggcaccagctgcccactgagtcactgtgagaagagcgaaggccaaggcttgggaaggtttccagctgacagagacgccactgaaacatgagctgataaaacaagatgatgttggagatttactaaaatactaacattaagatattaatactaaaaattaaaatactgaaattaaaaaatgtttaaagaaagaaaaaaatttttttgaaaacatgaacaagtgcaaggaggagatggatcaacccgagctggtcaaatgctagtaaacgctgagcccggggacccaggacactgttctctcagattttgtgactgaagatattccccacgcaaagttaaacaaatgttgagagtcagaaagccaccctgtggcagggactcactgaaagttacttcctacagctcctgcaccacccgttcatcagtggtccccgtttacggaccccggaagctcccgggtgacccagtccacctcagagagtatcacccacagaatgcaagctgactggtgtgtgcctgcctacctacatacaccccgaggaaggcacagcacccacagtacgtgcgttcactgcaaggaaagaatcttccagtcaccgttcctctgtccccattgtcgctgtcataaagaactcttctcccgctgcatatcaccggggttcaaataaagcccttctgagggatgccctgtgggaatgacagaagcaatggaaaaggccttcacagatcatccaatgcaactggaaaactaagacgtttacccaagattgtgaagcaatttaatagctgaacttgaacaaaaacacctatttccaaaattatccccagataagtggtaaggctgtggtaagcggcagcatccaacacagcaacaccggacccctggctagaataacccacacagtgatacagatgcgcaggaagctcaattccaaaacacacgccttccaccgggggcaaccccaacagggagccaggccaccctctccagccacgccagcaccgccgtccacccagctgctccttcgagccgtgcacggcctgagtcacaggaaaagcccagttctgctgagtggacggctgcaaggggaggctaaatatggctcatagcagtaccagacaccagcgattcgagagaaaacatcggcatgtgactgaggctgacgtcggaagttcacattcccacgagctgctttacttcacgaaatgaaaacatcatgtaactctcgctgatgcataaggaagacctgcagaaacgctgcagacacaaccccacgcgggaggcatgcacacgacacccctcccacacctacctgggatcccccaagaacccagcacccagggacacctgacagacgcctgtgtagggttacaagattggtagaaccttattcttacttttagttagagctgctattaattgcacttgacacagaggtggggcctgagtcttggcaggcggtccacacgggacagggtcatcaggagtgaccaccaagcgggctggggccctggcccactcgacatctccagaagggtctgacgaccacaatacctgcaggacaggagctccgcacttctgcaaagccagagtggagacaacacgcaagtgtgaggcccgcagagaggggtgttaacccgagacaaaaatgatcaatagttttactggtgattttcttcaccctcccctctccccatgacatcccttaaagagatcctttattcacggcaattctttttaaaaacattaatatcagacttcaaagatttacagtattttcatagaaatcaatgagattttatgcttattgaacctagtaattctcttcacttaaaaaatattactagagagccgaggtcagcgagttatggctcaccatgtgtttttgtaaaaaaaataataataataataatcacactcacctgtttacataaaatctatgactacttctgttctacatgggcagagctgaacgatacaacaggaactgtacatccagaaaagcctaaaataccactaatcggcccagtacagaaaaagcctgtcaagccctgctctgtgagagaattcagagccgatggcctctgccggccgctgtgtgtgtgagctacactctgtcctatgcttccaggatgcgccatctacagagcaacctcaggagagctgtgggaacagctgctcgggccatctcccgcgtgctacgatcagaggagaaaagctcctccagagagcatcgggaaaagcacttcaactctgctcaggtaaggaccagaaaaaaacaggaactaaaacatgccagctgaagaactccatgatgaacgtggacacacacgtgtgcacagagctgaccccgaacaccacggcttggctgcacacggcaagtcacccatcgatttgttttcaacaaatacactgaaaaacttattagagatttgtgaccatttggaaagaattacaaaccatacagcccaggaataccgaaaaaagtcagaaaaagtatgtcatgaatgtacaaaatatatgtagatattagtctatcatttcctaccataaactatacacagattataaaaaattaaacgcttataaatacttacagactgtacatggcatcgttcagcagagggaaacgtaaacaaacgtaacgtcgcaggctcaagcagaagtgtatacaactcagtgcgggacataccacactgcacgctgtaatgatctcacagccacagcctgtgctaccgcggtgagctcaagtgtgtcggtatccgcttaaaacaccgtgtgacactaatcgtctccgcgtgagcagctggtctctccagaaattgtgtatcacagtaaacaaattatctcaagccttaagctagttgcggtagcatgggcctggagtcccagctactcagaaggctgagataaatggatcgtttgagcccgggagtccaagactgcagggcactatggtcatgcctgtgacaagccgctgcgctcccgcccaggcaacacagcaagactctatctctttttttttttggagatggagtttcactcttgtcgcccgggctggagtgcagtggcacgatcttggctcgctgcaacctctgcctcccaggcccaagcgattctcctgtctcagcctcccgagtgattacaggcgcccgccaccacgcccagttaatttttaaatttttagtagagacaggggtttcaccatgttggccaggctggtctcaagctcctgacctcaagtgatccgcccagcctcagcctcccaaagtgctgagattacaagcatgagccactgcacccagccgactccgtctcttaaaaaaaaaaaaaaaaaaaaagcctcttgcagttctcaagtctttttcattgtgtttactcaataccataaaccctaaatgacaccacagacccacacaaagtgccactagcgatgctggcagtgctcccaagaagcagagctcccaggagttgtgactttaggaaaagctaaacttgcgtgacacgccgcagcctgtgctctgctgtggatgcttttcaaaatcgataaatccagcagaagggccatcacaaaaaaagaacaggacatccgtgaagccatcaccgcagctacagcaacaggcttgaaaatttttttgtgaaatacctttttatctcactgaaaacgcagctttaaaattaattcccaaacagcacggatatatgaaaatgtgtgggtgcaggattgctataagaaaggcaaataccaatagactctagtctgattccagaaaagtgaagccattatacaacaactgaaagtaaaaggaaggggaagcagctggagaagtggatgccagcaaaggatggtttgacagttttagaacgtttggctttaacaatgtcaagataacaggagaagcagcttctgccaaccaagaggtagcagatgaggtcccagacaccatgaggaatatcatcgaggaaaaaggacatgtgcctgaacagggttttgtttttgtttttttgagtcagactcttgttccgtcacccaggctggagtgcagtggcatgatctcagctcactgcaacttccacctgctgggttcaagctattctcctgcctcagcctcccaagtagctgggaccacaggcgcccaccaccatgcccggctaatttttgtatttttagcagagacgagggtttcaccatgttggccaggctggtctcaaacttctgacctcaagcgatccacccaccttggcctccctaagtgctgggattacaggcgtgcgccaccacgcctggccctgcctgaacaggttttgaatgcaggtgaaactcccctattctggcgaaaaaaatcctgtaagaacatttgttagtaagaaagagaagcgagcactgggatagaaggcaagaagggataagctaatgctactgttttgtgcaaatgcagtagggtttatgataaggactgcctttatctataaagctgcctacctcagaaccttgaagggaaaagataaacaccagctgccaggtatttggttttgcaacaaggctggaaagaacccctttttccggactgcttccattgatgctttgtccgtgaagtcaggaagtaccttgccttgccagtaaggaactgccttaaatgttcttttgacaatgaacaatgcccttggtcccccagaaccccgtgagttcaacagcagaggcgtcaacgtggtcttcctgtccccaaacacagcgtatctaattcagcctctagatcggggtcataggacctgtaaggctcattacacacagcatgctatggaaaggactgtcaacatgggagagagagagagagagcatcatgagtgtctggaagatgacaccatgaaagatgccatcattgttatagagaaagccatgaaagctgtcaaacccaaaacaatgaactcctgctggagaaaactatgtctggaggttgtgtgtgattccacagggtttacaacagccaatcaaggagatcatgaagagactgcggacatgtgggccggggcaggagggctggggggcggggagggatgaagggtttcatttcaaaactcaagagctaagagataccacaccagagaaattagaagacaacctggtggtgatgagtgcttctgacccacaccaggtgacgaggaggaggtagcagcagtgacagaaaacaaagtgacatcagacactcctgcagaggggaggggttcccacgactcccacccgcttttaacttcttgtacaacacacacctgtctgtgacatgggcactgaaactaaagccaacagtgagggaggactgtgaccatacaggaacatttctagagaaatgacaaagcacttcgtaagttacaccaaatgcgcctgcctctcctgcctccccttctacctcttccacccccgccccatgagaacagcatgaccacccctcctccttctactcaatgaaatgatgaggatgaagaccttcatgatgacccacttccacttaatgagaagtaaacatattttctcttccttatgattttcttaacaacaccttcttttctctagcttactttactgtaagaatacagtatacaatacatacgacatataaaatatgaggggcatggtggctcacacttataatcccagtgcactgggaggccgaggcggaaggatcacttgagcccagcagtttgagaccagcctgggcaacatggcaagcgagactctgtctctttaagaagcgggaaaaaaagtgctttgtatatgtcagtgttggattaaaatgtgttgactgtttatgtgatcaggaaggcactggtcaacaaaattaaatactcggggtataaaaggttatatgtggacttgactgtaccaggggtcagtgccactaatccccaagttgttcaaggaccaaacatatataatgatttcatcaacgtgtatgtcaaccatattgattaggtcaatattgatttgtaattcttgataataatttcaaatcatggcattgaagcctaaccacaaaaacctcctcagaaaatagcaaaaacgtagagctttaaagatattaagctaaatgtacgtgctataaggctacagatacagcaggctggaaatagtctggctgagaacacacaactggccagcatgactagcaagtgctcaagtagcttctcttgtttgaagacactggtgtacacaaagatttctgcctcctgggttcaagcaattctcctgtctcagcctcccgagtagctgggattacaggtgtgtgccaccatgcctggctaattttttgtctgtgtattttagtagagacggggtttcatcatgttggccaggctggtctcaaacttcaggcgctgtggtttaaaactcttttatccatgttttaaggggttgatgggtggggcgaggtggggaagggctttccaaggctgaaaacctcttcaggggttggtgggtggggcgaggtgggaagggctttccaaggctgaagacctttttgggtcaaggttctgacggcacactggggagcgtcaagacgcctcctgcagtcgtagacaagccgggctgaggcattcactgtcgcttagaactgaaaacttagggtcgtccatgcccagaacgtcggcagtgcggaccagccccaggaaggcctttctcactggcttctagaaggtggggccggcccccatgcctgccccggcacacggccattctgggagctgctggcagccggcgggctagaaggggtgcacaccgtctgtatgtgcgtcacaggctcatgcttttttaatcctatcttgaaaacttagggctttctcacaaagaccttgtgccagttcctaagtggaacaacaattttataaaataattttaaatggctcaaatcaagtgttaccagtgaacggggctttcattatatgtcgaaagctgaccatggggaacaggcccacaggggcctcctgctccacaccctgtcagggcatccaaaaccagctcatgtaactctgctttccaggagtccaacttgaacatttttttaaagagacaaagtcttgctctgtcgcccagacagagctcagtcacggctcactgcagcctcaacctcctgggctcaagtgacacttctgcctcagcctcctggctccaacttgagcttacagttttctgctccaccactgctctctgcctcccacctccaggtgactgggacgcgagcgccccaagcagcacggaagagctccgtgcagtgcacggatttgcgaagaacgtgttggttcttgtgattcacaaagaacttggactgagtacaacgggcaaagaagatgtcagctgtatttttaacattctgttcagcaagaagagtatacataataatttcccaaaaaatataatttttgaaaatgcagaaaaataaaaaatttagaaagaaatacatggctgcagacactgaccttttcagttttccaatcatcatttctcaaaacacacactttcatctctatttaccaaacactattttctgcatctccaaacccctcaagcttcagtccaggtccaagtatcaatgggtatatatgaagctcctctgccaccagaaattcactatggaaagatgttatttctggtaccccagttgcaaaacaatgatgcctgtttttttctttttgagacagagtctcattctgtcacccaggctggagagcgatggcgtgatctcggctcacttcaacacccacttcacaggttcaagcaattctcctgtctctgccccccgagtagttggtattacaggcatgtgccacgacgcctggctaattctgtatttttagtagagatggggtttctccatgttggccaagctggtctcaaactcctgacctcaggtgatccacccacctcggcctcccaaagtgctgggattacaggtgtgagccactgtgcccagcccaatgatgccattttaactccttttctcctaagtggattagagctccctgagccttcagatagcttccttggggctactccagagaacgaccagcagtctccacctgcataagaaacgggacacagggcacgaagagcagccccaggacctgcccgctgccttgggacttgtgaaagcattttttgtgtaatgccaaacaggtctttgttaaaagacaataaccaataggagacaggcttctagatctgcagaaactctagaaataaatgaaggaaagcctgacgagtacctgcctgctttccagggaagagaagtgagcaaaggcagagaagaagctggaggcctcgtggggcatctcctgcacgggcagcagggctgcgtaaccaccacgagcactggggcttatgggaggaaggagtgtgtgcagttccggccccaaaggtgaccaggcctacacggggcaatgcagctcagaggtcgtgggcagaggacagctgaggcaggcagacggagcacgcatccctgcttcccagtgtgggcccactctgctgggcaaggttctaaggggctccgagtgaagcccctgagcacacggtaaacaatcgatccaaaaagggatgagaagggcggctgggcgaggtggctcaggcctgtcatcccagcactttgggaggccgaggcaggtggatcatttgagatcaggagtttgagaccagcccggccaacatggcgaaaccctatttctactgaaaattaaaaaataaaaataataagctgggcatggtggtgtgcaccggtaatcccagccactggggaggctgaggcaggagaattgcttgaacccgggaggcggaggttgcagtgaggcgacaatgcgccactgcactccagcctgggctacagagcgagactctgctgcaaaaaaaaaaaaaaaaaaaaaaaggggtgagaagggcaagcaagagttcagactattagaagcaagacaccaagaaactcccagacaccaacacctaccagtttagggttattgtataaggagcaagagcttttcacattgtaacagccccaacattaaatcatcaataaaaagcaaaatgagggtaagcattctagtttataaaacatgcactatgattttctaattatccaaacaagtaacttacatgcgatgatacgctttccaacaagaggagaacgatgaaagctgtcaacatcccccaacatgcctgtcacaaatgcgcatcacagaaacccaccttcagaactctcatcaggaaacagatgccctctgctactcacattcagactggagaatacctgtcagcatatacacccctccttaccgaatttatacactttgtgaacaagtgttccccgagcacattgaccccacgcgaatggggggaagaggtagaggtcagatgagacccaggagggcataacttacagcctctgccacaggccactcacgtggtgaccacagtccagccgactgcactctcaggctgtgacctctccacggggctcagactgtatctagttctatcttcaatgtagtgtgtctgagatcgtttaactaaaagtgctttacaaaccgtgcaagcagccagcacgactgtccaggcccagggaaggtgatgggaaggagccagtgaatggggcccaggcaggcgccaccagaacgggcgagggggacgcggcctcccagcagctgggcacacccaggggacagagagtctgctcccacccatctcctctttcccctggagcccttgaacccatcaaatggatttaaggccactgaccagggcaggagtgacccaagcaaagttaaaaggtgtctagaaattccttgagcctctaactgcatcttaaactagacagccaggcacccgaagtctagaaatatatatatatatatttttttaaagacagagtctcgttctgtcacccaggctggagggcaatggtgcaatctcggctcactgccacctccgcctcccaggttcaagcaattctcctgcctcggcctcctgaatagctgggatcacaggtgcgtgccaccaagcctggctaattttttgtatttttaatagagacgggatttcaccatgttggccaggctggtctcgaactcctgacctcaagtgatccaccttgatccatccacttcggcctcccaaagtgctgagattacaggcctgagccaccacacttggccgacaaataaacaattccccccctccagtagatggggtctcactatgttgcccaggttggtctcaaactcctgggctcaagtaatcctcctgcctcggcctcccaaagtgctgagattataggtgtgagtcaactgtgttcagctgaaataaacgtttaaccaccaccttgacatcatatccaagaaacaaaagtagagtttcctttgtttgcccattttttgagacagagtttcactcttgttgcccaggctggagtgcagcagcatgatctcggctcactgcaacctctgcctcccaggttcaagcaattctccagcctcagcctcccgaggagctgggattacaggcgtgagccaccgtgccaggcttgtaaagcgtaacttttaataaaggtagttattcaattatgccatgtcatatacctctctcgtctggattcaactttcacaccactgtaatataggttttaaaagctgggtgtgctggctcatgcggacccacagcctaaggccaaacagccgcctgtgctgctgagtaaagggagcggtgcgaggtcacctcagggaggaagagggaggagccacaagagcaaagtgttcagctggctgaaagctcaagataaccggctctgccagaagcactgccattaggatttccagggaacccctcctagccatgcctgcctggctgctctggaggggcagcagcagccccataccaacgctgacctcctgagagaacaagacgaggagatctgtgccatggctgtccccacactctgggagaatgtgagttcagaaaggcgctgtatctaccctccctgatgggctcatttctgtctcattcaaaacctcggggccatgtccagtggacgctgctgcctcctgtgtctgcaagaaggaagagccatgaagttcccatggaacaaagcacggccaggaatggccaaagccgaagagcctcccatggtgtcacgtcgagcccctgccctcggaccagcaacgcagcagacgtcgagcccctaccctcggaccagcaacgcagcagacgtccagcccctgccctcggaccagcaacgcagcagacgtccagcccctgcactcggaccagcaaagcagcagacggaaagccaagaaggcccaatgccaagagcccaatcatgatagcacccagagggcaaaggtgcagactcctccctcactcccacctttcccaaacaccacctccaagctccagtcatacctctgtctcacaaacacccgctagggccttgtcaaactcacctcccactgacgaaggcgcttcacaaaagcatctagcaagataaagaatctgaaactgggaggctgaggcaggcaggtcacctgagctcagcagttcaagaccagcctggccaacatggcaaaaccctgtctctattaaaaacacaaaaattagccgggcgtggtggcaggcgcttgtaatcccagctactcaggaggccgaggcagggagagttgcttgaacccagaaggtggaggttgcagtgagctgagatgtgctcctgcactccagcctgggtgacagagcgagactccatctcaaaaacaaacaaaaacaaacatttctcaaggctgggcacggtggctcacgcctgtaatcccagcactttgggagaccgagttgggtggatcacctgaggtcaggagttcgagaccagcccgtccaacatagcgaaaccccatctctatgaaaaatacaaaaattagctaggcgtagtggtgcatggctgtaatcccagctatgtggggggctgaggcagagcagaacgggatgggatgaaatgggacaggacaagatgggaatgggacgagatggaaatgggacaggatgggacgacatggaacaggatgggatgggactgggatgggatgggatgggaatgggacaggatgggacgggacgggatggggcaggacagagcagggcagcttctgcaggaaggagcctctgcactggcagtggcactgacggcttcaaaggagctgcgaagacacaaactacagaaagaatagaactcaattcttccctccttttacctcaatcaggtggccttttggtcttactgtatttttggcaacctgtatttagcacctacagaaaaagcaggcccactagacagcccaacaacagaaccgctgcaggtgagaacatacgtgtgtaagaacatgtgtgtgggagcacacaatgagaaatagttttcttttttttttttttttttttttttttttgagactacgtttctgtcgcccaggctggagtgcagtggcacaatctcagctcactgcaacctctgactcctgggttcaagtgattctcctgactcagcctcccaagtagctggaactacaggcacacaccaccatgccaggctaatttttgtatttttagtagagacgatatttcaccatgttggccaggctggtcttgaactcttgacctcaggtcctccacctcccaaagtgctgggattacaggcgtgagccactgtacccggccttgagaaatggtgtttttttgtttgtttgtttgagatggagtctccctctgtcacccaggctggagtgcaatggcccgtctcagctcactgcacaggtgtctgccaccatgcccaactaatttgtgtatttttagtagagacgctgttttgccatgttggccgggctggtctcgaactcctgacctcaggtgatccacccgcttcagcctcccaaagtgctgggattacaggcgtgagccaccggacccagcagacagaaatggttttctatggcagagcagactgagcccgtccacaagccagcaccgggcagagggaagggcgccagagacaccgagaccctgtgggtatccctgtgtcagagcctcaagctgctccctaccaattctccaactctactgagtgagcaagaagacagtcaccatattcccaacacaacacactcacgatgatgcatttccacatttcactcaaatgctttaaagatttcaaaactacgaattcactttaggtacagtccatcacgtacagtctgcaaagaaaaccccactcagcaccactttcacgtctgacgacagaaggctaacgtgagtggcagtgagaccgtgccagagcctgcctgcctcacccccgccgctgcgcagccagaggccggggattaggccagacaccagcggctcgccaagagctccatttgtgaccgttccctccgtaggcaacccggtggtccccactcccaggaggtcaccacacggatgccaaacttagcacacagcggacagcagtccagaactccctggctcaagccggcctcccgctcagcctcccaggtagctgggaccacgggtgtgcgccgccatgcccgcaaactgggtccaatttgtctgcaagagaagcaaaggggatgccagggcttctcctattcctcagattttcgtttttaagtaaagtcattacagattaagaaaatacaataccggcttccaatgaacaattcatcttttaatgtaagtttaaaacaaaatggaaatccacactacaagttttccattaacataatgaccaaataaaaaatgactccatgttaaaaatcagtcactttttttttttaaagcttgattattaagacagacaatgcactaattctcccttctgagggcagcacgaccaattcccaacgttactcgtgtgtccagggaccgtccacactgccctgctgccccaccctttacccaaggagacgccagaaacccagccactggtccctagcaagaggccctcttttctcaccagggacagtggaggatagaacccggcacacagcatgagggtgtgggggaaagggggctcttctctggaaggatggcagtggcccgcaacgaccttgcatcctgcaagatgcccgcggggaggagtgtatccaaaagcaccctacaggacacgagtcaagacagaatcacaaatctcttctcgtccaggaaacttgactcccttaccttctgctaggtggaaaagcagacacgcttataagctactcaagttttttattaaaaccattgactgttggatttcatcaatccaaaatagcactgtagaatccttccagatggcacaatgacttgtaaacagcatctccataaagcagaagcctgaagactcagtcctatcacagccagagctgtgtgcgaacagacaagccctgagaagtgtgccagcaagagaccctgccccagctccccacgcctcgaccaccgagtcaagggcatgaagggcttggcagtgagggcaggagggtggccccaccctgggagccctgtatcgactgggtgctctggaggccgcccgtggtgacaggccagggctgctttcagacctcctggaaggtgcaggagccacagaaggccccagtgacatggaggaggtgtctgccctgccaagagcagcgagggtgggagaggtaggtcacacagccaccaccaaacaatggtgaagaaggcccactaaggacactgctcagcaaggaaacacacaggaagatctggagtgccaagttaaaaaaaaaaaaagcatctctcaagggagaggcctgaatggtgggagtgcccctcgaacagaaggaaggggctgcgtctgtggtgaggggacagcagagggatagtcaggcctcccactctgcaccacaggtctgtgaagtttctattaagactgtgcttgggccgggcgcggtggctcactcctgtaatcccagcactttgggaggctgaggcgggcagatcacgaggtcaggagaccgagaccatcccggctaacacagtgaaaccccatctctactaaaaatacaaaaaaattaaccaggcgtggtggcgggcgcctgtactcccagctactcgggagactgaggcaggagaatggcgggaacccgggaggcagagcttgcagtgagccgagactgcaccactgcactctagcctgggcgacagagcgagactccatctcaaaaataaaaaaagaaaaagaaaaaaaaaaaaaaaaaagactgtgcttggccgggcacggtagcttgcgcctgtaatcccaacactttgggaggctgaggcaggtgaatcatttgaggtcaggggttcaagaccagcctggccaacatggtgaaaccccgtctctactaaaaattcaaaaaaattagccaggcgtggtggtgggtggtggtcgggtctccccaactactggggagactgaggcaggagaatcgcttcttgaacccaggaggcagaggctgcagtgagccgagatggtgccaccgcactccagcctgggcaacagagcaagactccatctcaaaaaaaaaaaaaaaggactgtgctcatctgttaggttccttttttaaacttcagacttacaaaaaagttgcaaaaatagttcagagtccctgtacagccttacccagcttccctaatgctaacatcatacataaacataaccacagtgaaattatctaattccaaaatcagcactaacaccagactattcaccaccacaaagacctgactccgacgcaatcaccctgctccagggcccacgcgggtggtgccgggtgctctcttctctccatgaggctgattttttttttttttttttttttgagacggagtcttgctctgttggtcaggctggtcttgaactcctgacctcgtgatctgcccgccttggcctcccaaagtactgggattataagcgtgagccaccacgcccagcctccatgaggttgatttttaatgtcttgaaaatcgacacggaatagaaaataagcaagatttgcgtttccctgtggtgctgtcgaacgcacacacgtcacaaaaaagcccacgagatgacaaaaaagcctgaatgctgcatgtgtgtctctgactgggaataaggatcactggaaaatatttgcacctgagaagatggggctgaaggaggctgcatagagcaggagccctgcgatgagccggggacccccttggaggtttagcggacaggacgtcatccacacaaagaagagccggcaggtcccgggctcacacaggtctggaatggtgccactgcccagccagatccctgtccgcagccctgggaagaaggttctggaaggcactgccacagcccggggaatgatgaacccaaaactgaaccaagctccagcctgtctcacaaatcctaaaagcaacagctgaaagggacaaaaaggttccaaggaactatgtggatcccagaacaaagcccaagatgacttacaggaatatacaattatccagcacataatgaggtaaaattcacaatgtccagcatcccatcaaatattctcaggcatggaaggtggaacaatttgagcaaaaaataaataggacagcaatggattacagtgctggagtgcagtggtacgacagcctccagggctcaggcaatcctcccacctcagccttctgagtggctgggatgacagatacacgccactacgtctggctaatttttttttttttacttttagtagagatgaggtctccttacgttgcccagtctggtctcaaactcctgggctcaagcaatcttcccaccttggcttcctacagtgctgggattacaggcgtgagccaccacacccgacctacaactttgctgtaaacctaaaatttttcaaaaataaaaagtatattgaaaaaaattcctgggcatgtaaataagaaaatatgattacataggagaaaaaaaagtcaatcaaaagctacccagaattgacacagaaggcaaaattagtagatggagacatgaaatcgtgtaactcagttcctccccacggtcaaaaactaaaaacacggaagctaggaaaagacactggaatgaacctctagagatgaagatgacgctgtgtgagacgaaaatcacactgggtgggattcacagaagaacaggcattcagaagatctgtgaactcagagaaacggcatgtcaacaactcaaacatgagcaaaaacactgagtgtggcagggagcaccgagagagaagatcactggggcaaacaccgagtgtggcggggagcaccgagagagaagatcactggggcaaacaccgagtgtggcggggagcaccgagagagaagatcactagggcaaacaccgagtgtggcggggagcaccgagagaaagaagatcactggggcgaacaccgagtgtggcggggagcaccgagagagatcactggggcgaacaccgagtgtggcggggagcaccgagagagaagatcactggggcgaacaccgagtgtggcggggagcaccgagagagaagatcactggggcgaacaccgagtgtgacggggagcaccgagagaaagaagatcactggggcgaacaccgagtgtggcggggagcacagacagagaagatcactggggcgaacaccgagtgtggcgtggagcacagacagagaagatcactggggcgaacaccgagtgtggcggggagcaccgagagagaagatcactggggcgaacaccgagtgtggcggggagcaccgagagagaagatcactggggcgaacaccgagtgtggcggggagcaccgagagagaagatcactggggcgaacaccgagtgtggcgtggagcacagacagagaagatcactggggcgaacaccgagtgtggcggggagcactgagagagagaagatcactggatcaaaccccgagtgtggcgtgggtgaggtgcaggagcctaaccaacggtaaggggtgctcccaaaggaggtggagggcagaaaaaaatacgtgaaggaataaagcctgaacatttccacattttgatgaaaactgtaaactctagtgatccaagaagctcaacaaatcccaatcacaaaacatggagaacctgaccaaggcacatcacagaggtgaaaagaaaatcttaaaggcagtcaaaggtgagaaactaggtaaagaagaacaggcaaaagggacgacaggttctcggggaaacagtgagcacacagccaggggccagcacccgtaagtcctgcagaaaaacacctgtgaaaatctttcaaaaacaatgctgctggtaatggttgtctaactctggggaggaggttcctggagctctgcgctgctccccacatgccctgccctccgcatctgactgtgcatatcctttgcaaaatcctttccacgacactggtgaacatgtaagtgtcaccctgatttgtgtgagccactctcataaaattattgcaccaggctgggcgccatggctcacgcctgtaatcacagcattttgggaggccgaggtgggtggatcacgaggtcaggagatcgagaccatcctggctaacacggtgaaaccccatctctactaaaaatacaaaaaattagccgggcgcggtggtgggcgcctgtagtcccagctactcgggaggctgaagcaggagaatggtgtgaacccggaaggcggagcttgcagtgagccgagatcgcgccactgaactccagcctgggcgacagagcgagactctgtctcaaaaaaaaaaaaaaaaaaaaatgattgaacccaaggaggggtcacggaaccccagattcagggcaggtcgctgagaagcacagccacaggaacccagggcttgcggtgggtgctggagtgctggcagtcttgcgggactcagtcctctccctggtggaccccgtgccgtctccaggtagacagtgtccaggctgcacgggattgtgggacacccagctggtgtccgccacagaactgactgcctccctgctgctgggcagaaagcccacacaactggtcacagacgtcttttgcgttttctgtgttgactgtcgctgtggcatgagagcaaaggaaaaatctgagttttccccctcagaacccctactaactgagcttagaaatacatgaagtcaagctacacagacagatacacaaaaccacaaactcagtaatgattttaataccctgttctcaatcactgagaggacaagctgacagagaatcagtaagcacacttgtaagaagtaaagcagaggttcctcttcaaagactttcctccccatctaactaaaaataaatagtaacttctcttaaaagcaacatttattcaaagacctgtactgacattcttaaatatctgctagccttaataaagaaatcaatgtactttatgttcttagctcccacaatttagcctaaatatctgccctggcatgcttatactggtcgaagcaagcattaggtcacggcctgttcctcttccttagttgaaggtgtttttacctttctcagcattccacaaattacttcctccttcctttgttctcctctgcctttgcctcttttaaaaagttctaagttgctagccaatcgggacaaatacagaatgtgaggtcccgttccagccaatggaaaccggacacagcagttggtataaaaaaaccggacacagcgtcaggttataaatgaccctggtctccttcattcggtgtactctcgtggcaaaactgcaggcgagtgtaccctttctgcagaaggtataaaaaatggccttgctgaggaaattaaatttacgttcaagtgctatttctttacggcaccagggagcaagcatttcaaacacactgatggcccattcctgaaggatcacaagaagctaaaattcattacctgtataagggagtttaagttagattttcacccttttcatgttttcttacattttctacaatgggtaaacgatggaaataagaaaaacaatgtttatgttttgaaaatgtctcaatgggtctgccagttcatgttttccatgagcagcactgtgatgccacgctgagatgctccagggtccatgcagttcaagaacatggtcgtgatgtgttgaagcagacctgtcttggttgtccctcagatcccagctacagaagttaacgatcaactcagcatctgtaatgcacttcggatgtcagcctacaagagcagacccaatcaacatggttgagttcacagacaacggtatctaggatgtccggcacacccagaacctgcacttaagcaaactcgtggataggaagtcccccaaggctgcttttctctaaacactaggttaggaaaaaagaaaactgggaatacatttaaccgactccatcaactacataagaaagcacctttgagagtgaacttgtgtctaatcaccaccttgggacctgcctgcatctgaaatgagtgagtgatctacagtcaccaaggccctttctgtttccccaaaaattccttttctaaactccagcctatttcttcacattctacttcttattcaaggcctatgcaaatgctaaccctcagtggagcctccggcaagcccagtccccaggaaacacggtctccctccctcttcttcacctgcataccttctctcacaggagcctctggaagtctccctcaggacctggcaccttcttgctacatcataaataccttgagagcacgacgccagcctcattcacctgttcccacaggtgacatggctcccaccctgggaccaagagagtccactgtacacattaaactttagtttcctcttttttttactttttttatttttattttttttttttttgagacggaggcttgctctgtagtgcgagaccactcaggcaggtggagtacagtggcgcaatattggctcactgcaacctctgcctcctgagttcaagcaattctcccacctcagtcccccatgtagctgggattacaggcgtgtgccaccatatccagctgcttttttttttttttttttgtatttttaataaatagagacggggtttcaccatgttgcccaggctggtctcgaactcccgacctcagagtgatttgcccgcctcagcctcccaaagtggtgggattacaggaggaagccactgcgcccggcctagtttcctcttaggtggagtaatcacgtccacctcagaggatttgtaagggttagaaggggaagcagccgggccgatggaaacatgcaggaactatcccagctgggcctattgcccttcattctggaatctggcagagctctgcatggcatctcgcatgaaacaggctctaagtatttaatgaataggaggagacatgtcagacagtgggaataatcatgctgatctgcatgaggaaaatgtgtcaaaaaacaaaagccaaaaagtcacgaagaaagtgcttgtaatagagactagtttacttgtgagggctacgaataagtgaagctcaaaccactaggtgccaaacatgaaagtgggttcccagaccccagtgtttgctgactgcaacacagcggtgcctgcagctcacagggtgctcctccccgcctccctagccctcctggagactccacccatcacagtcccaggttccaggcaggcttcccaggccactcagctgctgcaagcacaatgtcctcctgaggtcaacgggcaggtggcaggagcctctgacctgcttccctccacgacatgggcacgttctgggactgcagttccacagtggtctcccatgtccctggaaagcagccgtccgcctctcctccacacctgccacactgctctcactcatcaggaaacttctcatcagaaaaacagctcgtgggccaggcacagtggctcccgcccgtaatcccagcactttgggaggccaaggcgggcagatcacctgaggtcgggagttcaagaccagactggccaacatggtgaaaccctgtctctattaaaatacaaaaattagctgtgcgtggtggcaggcacctgtaatcccagctactcgggaggctgaggcaggagaatcgcttgaacccaggaggcggaggttgcagtgagccagtatcgcaccactgcactccagcctgggcgacaaaagcaaaactctgtctccaaaaaaaaaaaaacaaacaaccttttgtggaaaaacgagtgtattttccactcctcgtctcaataaaacctgcgaagactgctttcatatacaggagtcgtgttttatgacaaaggctccatcaaggatgctgtaaaattacacacagccatctccataatatatggccccgagagttacacacatgaggttattgagttatttttcaaacgtccagactcctcatttccaattaaggcaggttggctgtagcactgttggaaagcctaaagctttgtttgcagccaattcagaggcgacagtttttccaaggctacttagagctgatgagagaaccccctgttaaaaagatctccaaaccagcaaatacatcacggtatgattttaagtcactgcaatccagatcatcttaaaagttctgcaggatttggaaaaacaaagacaaattattaaaccaagtgaccaggctgaagcacaggacaagatgaaagagggccaagaacaggcaacaccaccactcaaacgatccaagagactcctggtctaaaaagttagaggcttggtcaattttaaggcagcgtcttaacagaaagaattatgcaagccaagtaaactggctgagccccagggaagggctgcgtactgccagaggaatgggctggactctttccagctccgtaatcctgggagcagcgtcggtgtggaaggaaccctgacggcaagctgttacataagagcccagtcctgcactgcggggacatggtccgcttgctactggcatgcaaagatcaaagagaggagacagcgctgggatgccagcccacggctgggacacgtgctgcttctgtgagcatgcgcccaggaacagacgcacagacccacccgaacggggaaccgaatcttacttgtccatgagaatcccaggaggggaccaatgggccatcacattggaaccctctgaaactgcacacacatttgcaagcataggtatcaggggaggtaagtgatacagactcttctaagggtgtgaaatgtttgaaaagttgtcaataagcacacagactgacctgattcattcaacaacattttctcacccagcacacagactgaatagcttggtacacttgcttcccaggtgtaaaactacctgcttaataacaatgccttctcagctgggtgacaccgcactgatgagccagttcactggaggactgctggggtggtgcggcaagactgtttcaacgcactacgtcccgagcacgcagcattcatcttgtgcatatccttcatgacaaaacaagtatgcacaaagcactgctgccgcacaccagacacagcggcctctggacaggaagcaccaatcttcagtcaaagaatgaccgaccgacatgcaaactctggttgttcggacatgagtactggcagatcatttctaaaaaatgaaggaaagacagctgcaagttcagccagaacacctcaacaacttgttgtcaatgtgaaaattcaagctttcaaagataagaattttggaaaactccaagagcagacagcttctgaagaactaaaagtctccctggaagagacaggtgctgctttctgatgtagtaaaatcaagtggatccacgtcgggagatgcacacgagtcccgggcacccaatcggcccttgggtgcacactgtgtgctgacctgggtcacctccagatgtggacacacaggcacactcccacacacacgcgacggagccgcactcgccgcaagagagaccaaagggaagccctgagactcccctgctgctggaaacgctcacagcacaaacacctgctgggttttggtgtcgtatcaatgaaaatctccataattatatcaaaaagctatttattaaaaatatgcttccattttcccactagattttttttttgtatacttcaactagaacaacatatttaccacagactgatgcaggaacagcgaggagaaccctgctgtcttctatgaagccacacattaatggggtttgtacaattttaaggaaatgctcctctaattgctatttgttgttgttgctgttgtttttgggacggagttttactctgtcgcccaggctggagtgcaatggcgccatcttggctcactgcaacctccgcctcccaggttcacgccgttctcctgcctcagcctcccgagtagctgggactacaggtgtccaccaccacacccggctaatttttatatttttagtaaagacggggtttcaccatgttggtcaggctggtctcaaactcctgacctcaggtgatccagctgcctcggtttcccagagcactggtgggattataggcatgagccaggggacttgaccagatcactaattttttatactggaaaatacaggatttttttttttttaaagaatgtgctgcttatatgcaatgggcttattattcctgttgttaattggaattggtatacagacattttccaatccttcaggtttcaactggcaaatgccagcagacatacccacagagccagagctcctcaggctcctccacgtccaacggcgtctcacagtcctgaggatgaggacctgggtgaggggagcacgggagacacagccatcaaggcatccacctccaggacagacaccagccaagaaccccctcagggcaaggcctctcacaagtccaactccacggattccaccgtaagtgctgtcaactggatgcgcatttacaaaatctgagttttctcaaagaagctgaagctttccgtgtcctcagtgattctggactcccagcgccgtaccactccctgccagccacacagggggacccacaggaagcaggccttccccgtggcgggccttgctgctatccgcgctcctttctgtgcagtcgtccctgacggggaagggttgagcccagccaagtggatccctggctgcaggacaaaggtgtgcatggcaaggggcccacctgcctcaggctgaggcataaactttcccttttcactcaggaagggtaagacacagttcccagttttacagtgtgcttttgtggatgctgacccggtactgctcttggaatgtcaagatgaagatgatgcagaagcctctcctctgagcatcttctgattgacaggcaagggactggagtggagcccttggcagcaggcggtggccagggacaagcggcccgtgccacgtctcccagctagctcaccaccagcacacaaaccttcgtcctgggcatgggactctccatccctggtcaaagcaggtgcctcgggtggcaacacaggaccctcagacactgatctcctgttgttgaatcggtgcaatattcacccaccaaaaacaaccacaaagcgcctgtcaccagtgacaatgtagcactgtctatgtgaataaaattaaattgtgtttggagaatctggtgacgctgtgaaacagctgaagattacctgtaacctcagcgctctgggaggctgacaagagggacactgtgaaacagctgaagactacctgtgacctcagcactctgggaggctgacatgagggacactgtgaaacagctgaagattacctgtgacctcagcactctgggaggctgacatgagggacactgtgaaacaggtgaagattacctgtgacctcagcactctgggaggctgacatgagggacactgtgaaacagctgaagactacctgtgacctcagcactctaggaggctgacatgagggacgctgtgaaacagatgaagattacctgtgatctcagcactctgggaggctgacaagagggacactgtgaaacagctgaagattacctgtaacctcagcactctggaaggctgacatgaggactgcttgagcccaggagtgtgagaccagcctgggcaacacagggagaccccatctcttaaaaaaaatttttttttaacaaaacaataaaaaaacaaaaatagctgggtgtgttggcacctgcctgtggtttcagatactcagggggctgaggcaggaggaaggtttgagcccgggaggttgaggctgcagtgagctatatgactgtgccactgcactccagcctcagtgacagagagagattgtgtgtccaaaaaaaaaaatcccaatacactgttagtgtctcaagcccaggttagaaattactcgtctagtctctgacagaaaaatcaggtgggctaagcaaaggtgctttctggcccaggagtacagatgcagtggcaggcacatggctcagctggctgtgcacagccacccaggatcctggggcagtctctggacaaggcctcaaagaccccagacagactcccatcatccctctctcccatcagcatcatcagttttttaaaattgttaacaagctccatgctctgtgagacgcagtttccaagcaaggcattttcagtgttgcctcaacagaaactgcatcatccctgaacactgacctcctgtcacagcccaggtggctccgaacacggagcaggagcatgatgacacagcacgagtccacgcaaggacacctcctcatcaagacaagtcagaggcagaaccgagttcaggggccagtggctggctttgtttattcttcatttatccgtaagagaagcccagagagacaactacaagtgacccaagacactcataggtgagtggattaaacacccggcgtccatccagacaacagaatattaccaggccctgaaaagacaaaaaaggaccatagacgcatgctgctgagtgaaagcagcccgtctccaaggactacacgctgtacggttccgactctgacatccaggaaagggcaaaaccgtgcagacagcacaaagatcagcgaatgccaggggctggggagagggagggacggagggatgtgcagcaggaacacgggggacctggggcagtgaaactactctgtatgataccacaacggtgggtccacatcaggatacgttcatccaaccatagactgcacagcacccggtggaccctgaggtcgtgcggcctgtgggtgatgatgacactgtctccagggcggtcgcgactataacaaatggccgctcttgtggggatgctgagcccaggggtgcgggggaaccctctgtaatttatgttctattttgctgtgaacctaaagctaatataaaaaataaagtctactttttttaaagtgaccatcctgtcagaaagacaaaatggtcccagagcacagggcttggattcacacagcacagaatcggctcccagagcacaggaaggtccagtgcaccaggaccaagaagcagagtaagccgagtgacacaagagagggcagcctctgccccaggcttcctgcgctgggggccggtcatctgctgccccaggcttccctgcgctggaggccggtcatctgctgccccaggcttccctgcgctgggggccggtcatctgctgccccaggcttccctgcgctgggggacggtcatctgctgccccaggcttccctgcgctgggggacggtcatctgctgccccaggcttccctgcgctgggggacggtcatctgctgccccaggcttccctgcgctgggggacggtcatctgctgccccaggcttccctgcgctgggggacggtcatctgctgccccaggcttccctgcgctgggggacggtcatctgctgccccaggcttccctgcgctgggggacggtcatctgctgccccaggcttccctgcgctgggggacggtcatctgctgccccaggcttccctgcgctgggggacggtcatctgctgccccaggcttccctgcgctgggggacggtcatctgctgccccaggcttccctgcgctgggggccggtcatctgctgccccaggcttccctgcgctgggggatggtcatctgctgccccaggcttccctgcgctgggggccggtcatctgctgccccaggcttccctgcgctgggggccggtcatctgctgccccaggcttccctgcgctgggggatggtcatctgctgccccaggcttccctgcgctgggggccggtcatctgctgccccaggcttccctgcgctgggggccggtcatctgctgccccaggcttccctgcgctgggggatggtcatctgctgccccaggcttccctgcgctgggggccggtcatctgctgccccaggcttccctgcgctggaggctggtcatctgacgggaacccctgcagccacctggaccagctgcacacaccttggacgcctgtcgccctccaccctctgcagacaccctctcacaggctccaccctgctcgggttcacagacacatcccccgtctgccccggggctgcctggcatggcacccaagaccaagatggaaagggaggccccgcgtgtgggtggacaaatccacaacacgctggccctcaagttgtctcagtaatgttatatatttctctctcccccccacccgccctccccctccccagagggagtcttgttctgctgctcaggctggagtgcaatggtgtgatctcgactcattgcaacctctgcctcccaagttcaagcaattctcctgcctcagccttccaagacggccgccaccacgcccggctaacatttggatttttagtagagaccgggtttcgccatgttagccaggctggtctcgaactcctgacctcgtgatccacccaccttggcctcccaaagtgctgggattacagcacgagccactgcgtctggcattaaatttctctcttgattatgcagccactaaatatcacgctgggataatgggaaattaatgctaagctttaaaatgcagaatgtgaagccttatatccagagtaatccttattttgtaaaaagtacatgatatattcaacattttagatttacatgttttatcttgggtggaaggattacaggcgatttttactttcttctctatgctttatttactggtgttatgagttgaaatgtgtcccccaagaatggtatgttgaagtcctagccccccaacaccacagacgatggccttcctgggaaacatggtctttgcagatgatccaggtgagatcgctagggtgggccctcaccccacagaactagcttccttctacaaagggcagacgtggacactgagctgtgcacgcagggagaacgctgggtgaagagggaggcggagatcgtggtgatgcgtctacaagcccgggcgcaccagagactcccccatcccccagaacccgccgggcacaccagagactcccccatcccccagaacctggagagaggcctggagcagatgcccgcccccacccctccagcaccgcagaaggaaccggccctgcagacagcttggtctcagagccgtgggagaacagatccttgctgtgaaagctcctggtctgtggtgatttatcacggcagccccgaaagacccccacaccaagtttcactctctgtccatggacctctttaatggaaatcctgacttttccataaggcactgaatctgtgtaacttttagagtaaggaggacgacctacagttcactgcatgaaagcacagcccttccaacaaaggcaggcgaaatgtggaaccaattatatctgggtgcctacacgtgacgtacgccagttctttgtagaaagaacgaggcttgtctcagcgatactaatgtacagttcacatgaactcctaaccttagccagccacaataaggtatctgggattgagcgcttatttaaatcggtaggcacatcaatttaaatttaggtagtagctcagcctgtacctaacacatgaggaagccgaggcgggaagatcggttgactccaagagttcaagagcatcctgggaatgacagggagaccccgcctctagaaaaacatttaaaaattgctgcgtatggtgccgcacaccagcagagtcccagctactcgggaggctgaggtgggaggattggttgagcctgggagttcaagccttgagtgagctgtgggtggggggggcagcactgcagggtgaggtgaagggggtggttctgcgggaggaggtgaggtggctctgcgaggttaggagagggggcaggggctctgtggggtgagatagggggtatctgcagggtgaggtgaggggacagctctgtgggatgaggtgaggtgggggttctgcggaatgaggttgggggggcggcactgcgggaggaggtgggcggggtggggcctgcagaccctccaggctctcccgggggaaggagccccatcagggccagcactgcgccactcccaacaaagcaggcaacctagcctgccagtggagacctcttttccgcctgggctccagctctagagcaaggccagtcacctcagccccaccatcaaacaccaggctccacatgggcactgcctcgctcaactgcgtggtggcgggtggcctggaacgctgctgtcatcactgcacgtggacacatcatcaacctctcagcgtgacgtgccctcgtgctttcaggtaaaacactacagagaaacttcctgttggcaggtggaccccgcactccctagggcctgatccgctccctctcttctgctttacgggcactgacaggaagtatctgatgcgcactcactcacaccagccacgcacatgttgtgagcaatcctgtgtggcctgctcccccctcctgaccggcccctcctgactggccccagcaccgcgtggaagaacatggaggagctcatctgtctgaggataggaagcagcagagcacacgcaggtgagggcagagcggggaacccaagtcccgaggaagtttctcagtaagcgaggccccgcgctctgggagggcacccccaggaagcccacacataaagcaactggacacacgctcaactacgactgggcaatgacagtagcttaaaaaaaaaaagtacaccaccaaacagacaaagaccagagaccacttacataaaagccctgctgcctccccgggaagggatttcaaaacacttctttaggtgagcacgacagcacgtgcctttaatcacagctactcaagaggctgaggcaggaagatgacttgaggccataagtttgaggccaatctgggcaacagagcaagcccacctctaaaaaagtaaaaataaaaaaattaggcgggtgtggtgacatgcgtctggagtcccagctactcggaaggctgaggaaggggcatcatttcagtccaagagttgaggctgcagtaagccatgactgcactccagcctggtcaacaaagcaagacttgtctcttaaaaaagcaaaacaacaacacatctttatattatagggcacagaaaggagcaagattataaaactaaaatagggtgaaagaatgcaagagactcagaactatggcaaacttataactaaaattccaaactacaggaaactctcagagcaaacgctgcatcacataagctgctagcccggcacatgattgtgaagaatcaggagtcctctcagcaccaacagacagtcatggacacagcccacaggtggctcgacccaccagcctcaggcagcatggggttgagaggggaagcccagtttggccgactgtagaaccctgttctagtctcctatccaccctcaccaaggcactaaatcaccagcaaagactctgagaacatcaacatctgtgtaactaaggaaaatggaagtgcaggaaggaatacatttttgtaatcaaagggcatgaaaaaaattgccttcactgaaaacactgaaaaggtacaaccctattatgtctcctgctaggaaaaattttcctctgcttttaaaggattaatagccacaaaatattattttgttattctggtgtcctccagaaaatgagccaacagtttgaagggtatggggtaaagagaagagaaggaaaagctgcttttgaaaacactgttgactcgcaaagttaccagcactctatcaggctaatgcctaggtcaggagaagacagacgcagtcactactatggatcctgagggcgagaaactctggatgccacaaagtggcatgttcaaccttcctacaagcacacagaggtgaagcctggagaacaggcagggacaggcccagctggccatgtgctcagccacgcctacctcgcaaggtcattctgaggatgaaggcatcatggatccaaatgccaccttgacgctgaatgtactacacaataaaagaaccactgtaaatcacactattgactcttgcttggttgatgttctttcctttacagtaaagtgaactcgtggacaaacatcgtgtccacagaccaccataaatgtagtttgttgttttaaataaaactgaaatcagacttccaaaaagaaacatctaaaaacttctcctctcccatcccaccagagccatggcccacaacacagcccgacgccccgtcacacgctctcacaggacaactgcccacaccagttaacctggtgtcacggtggaggcgaggttgcggtgagtggagatcacgccattgcactccagcctgggcgacagagcaagactccatctcaaaaaaataaataaataaaaaatcttgtggaaggaggtaccacatatgcggtctgttgtggaacaaaatgccgttacgtggggcatgactgtattctgtagggcacatttgcaaaacagctcctctagtcacataggtaactgtttttgagacaagttctggctctgtcacgcaggctagagtgcagtggtgtgatatgagctcaccgtagcctcgacctcctgggctcaggcgatcctcccacctcggcttccccaactagctgtgactacaggcacgtgccaccacacctggctcatttttttttttttttttttttggtagagacagggttctcactatgttgtccgggctggtctcgaactcctgggttgcagcaatcctcccgcctcagcctcccaaagtgctgggattacaggcctgagccgccatgcccggctttctaggtaactttcctatcagccttcctgactgctgcagataaggcatgttctcacagggacaattcaggaaatgcaccaaagcgtcctcaaggcctgtccacgaagctcctccttccagccagaccctggggcttaggggtcaaattcctcacaccttcccccagcgctcctcacaaaggatgcactgcagtcaatcccaacttagctccagcaagaataatcccagcactttgggagccaacgccggcagatcacctgaggacaggagttcgagagcagtctggccaacatggtaaagccccgtctctactaaaaagacaaaaacttaccgggcgtggtggcacacacctgcaatctcggctactcaggaggctgaggtgggagaatcacctgaaccccgaaggcagaggctgcagtgaaccaagatcgcataactgcactccagcctgggtgacaaagggagattccatctcaaaaaaaaaaaaaaaaaaaaccttcagccagaaaatcaccaaagtcctaagtctggttatgccctttgttttctatttcttaataataaaaacacagcaaggggtttggtgctgtgagcaaggggctctctgagagtcggcacccacacgtgctggtctccaggacagacatgtctcaggccaacggcactgacagaagcacagaccctcactgccaggtcacggcgggcacgggaaacccacacctgggcctcggccacactcctgagggcgacaaaacaccagccggcgcgctctgagacttgcggtcagtcctagaggagaagcagcagctgctgagaaggccgcacgggcaaaggagccaccgtgcaccgtgacaagacaacatgttcgttggccatgcccggtgtcagcacgcagacacacaggcaccagaggctgcagcgaggaagacagatgtgcttccccagtgcttatggtctgggtggggacagaaaagagacaaggaaggcccagggcaggacatcagacacagggttttagttaaccaggactgtgatgccggcatctgcctggaggaaggaaggacagacttctgaagaagatggacctcagtgcctccttcacgctgataagcgatcccaccaagcatgacccacagcacaggacaaagccttgtgtccaggacagggtgccctccgggaggcagcagaaaggacagctgtggaatatggaaggggaaaaggaaaagggaacaggagacaaatcagcaacattaagaacatcaggccggacgtggtggctcacgcccataatcccagcactttgggaggccaggggaagggggagcagatcacttgaggtcaggagtttgagaccagcctggacaatatggtgaaaccctgtctctactaaaaacacaaaaaattagccggacatggtggcaggcatctgtaaccccaggtactcgggaggctgaggctggtgaagcccaggtactcgggaggcggaggaggcggtgagttgagacgtgccactgcactccagcctgggcaacaagagcgaaaccccgtctcaaaaagataaaaaaaaaagaacacgcagacagaaaagaatgacctaagaaggcacacgaggaacatcagcaaaggactgacagaaaaagactcatatttttatataaggaacacggggggaaaaagaaaaaaaaattaaaaggaaaagatgaatagatgatatggccagaggtttaaagaaagagacaacgagataaaagcaggaagccccagcaacactgggctgcctccccaggcccttcccagcatttcctgccagcagggcccctgccccaagccaaaaaggaaccacgttcgcctcgtcagggctgttgcacgacagccgcacacacctaagaaacaaactccttctgggccgcgcaacatggctcacacctgcaatccaagcactttgggaggccgaggcaggtggattgcttgagttcaggagttcaagaccagcctgagtaacacggcgagacgccgtctctatcaaacacacatacacacacacacacacatagacacacacagaattagccaggcattgtggtgtgcccctgcagtcccagctacttgagaggctgaagcaggaggatcgcttgagcccaggaggcagaggctgcaatgagccgtgatccggccactgcactcccacctgagtgagagtcagatcctgtctccctccaaaaaaaaaaaaaaaaaaaaagaagaagaagaaatattaactcctttgtccacatagtaaaactcagtcttccattaacttcaaaaagccaaactgataagtttttaagtaaagaacaaacacatctatagcgaagtgtggaaaatcactgtggtcactccccagctacagctgccatgcagtggtagtgcccctgccctcaagctggtcccagactcaaacaggaagccactgcacatgtgtgaccactggccaggcaaagagaggccaagacagctcgaaggacttgcgcatggccccagaaggctgcactatgtggcaagcactggatgcatacagatactcggccaagaaactccctgagagagctcacaccagcgctgttccctcagaagcccagttctccaccctagagaagtggcagcccttccacattcactttagccttgggctaccacagacatggtgaccaggacaaagaggcgtgaagctggcaaaaccaccaggtttgatgcacagaaaggccagcatcagcacccagttgcctgggcagaggaggaagaggatggcaggtacacaggccgttagaaacggcctcaccctgaccctgagcgtggtggcaagtggccgacccagattccctcaccctgctctggcacaccgcaggccagctgcatctggcaggagtgtaacagccagtgcccaggctgacgagcgtgagcactgccccacacacactcagaccctcaggaagagcatgaaagacgtcccagccgtgcccacagctacagcagcccctcctcgcaccccctgccaccctccctagagtccagcgctaatacaaccacctctggcctcagagtccccgggactcactcactcacttcactgatcagccgtggaatcctgaattcaaaccctacttcctaaacatcttttgaggcctacattcctcttgtaataaaaataaggaaaatgcaattttctgggattttgtaggaaaaaaagagaacataagtgaagatatctagcagagcatgtgcctctcacagaccttaggagttactgggaaatacaagtgaacaggccgctgtggagtgcggtttctaaaagtaggaggaatacagaaaaggcggccccaaccctgcctctgggagcaaaaccaaaaagagccacagccacagcagagaattcagaaaagccacctgcacaaaaggccagagcagccaagggaagctgggggcccaggccagtgagccctggggccaggtatcaggcccctcaaagagcagaaaacagattttttaggtgaagccgacggtctgaggaaatgagatgagctcacacacctgatgacagcttccctcagcaattccacccgcctccacaggactcagaccaagtcctggtgttagaataaatcactaggctacaagaaagctcaaacccccacaggttctagcactcctagccaccaacacaactctgttcaagatccacctatcaacaggggtggggtgggaaggcggtccccatcctcaggccattcttcctccgtgggttgcagccagggtttcctgtgggtcgtcttgtgcacgtcacggccctgcccacagcataaaaacatacaggtgtgagggagatgagcaagacagctagcttttcacaagagcaggaaaggctgggtgctgcgactcacgcctgtaatcacacagcgttgggaggcagaggaggaaggactgcttaaggccaggagttccaggccagtctgagcaacatagcaagatcctgttgtaccaaaacacacacacacacgaaaactggttgtcgtgttactaaaagtttccattacaacactgaagtttagaatacagtattactaggccaaaatatcctggcattttataggatttctttaacaaaatctgatcacatctaaactggcatctttctgctcacttctcaatttcaatctaaatttatttatttatttatttattttttgagatgggagtctcgctctgtcgcccaggctggagtgtagtggcacaatctcaactcactgcaagctccgcctcccgggttcacgccattctcctgcctcagcctcctgagtagctgggactacaggcgcccgccaccacgcccggctaattttttgtatttttagtagagacgggttttcacggtgtgagccaggatggtctcgatctcctgacctcgtgatccgcccgcctcggcctcccaaagtgctgggattacaggcgtgagccaccgcgtccagcctcaatctaaatttaaaacacagtttgctgttcagctacagggcagaatttcacacggagcaggcacctcacagatgccaacccggtgggtacggccctttgagtgtcacctaaagcctcataacatcatcaccaagcccatccccaaaagctgtagttagtaagccaccaggatttgatatttagaaacttttcccactaacaaaaaacaagcaagaataaattttaaacaaaggctgactgtaccaaggaaatggagataataaacagaaaaagactcatggacactggtgttgggagtgatggtcttagccctcagaccagactaagacaccctgcagagctgaggctgtcaggaaccacgcagagccacggaagggaaacacctgcccccgggctacaaaggccaccctctgccctctgcttactgctctggttctgccctccagacacaagcaggtccctaaagcagttgctatcctgctgacgtgctgacaccatcagatatgaacaagaatcccagttttatttttcctaataaataaatcatccatttagcaaaacgtcaacgataccaaaagctatgaaagcatccttggatttacaaagaaccctcgcttctcatttcccttattttcccatgcccaggcagagagccctctaagcccatgggaagcttaacagaagggggtggggagtggccaactgtggccagggcaagacagaaaccacatgtgcgtgaacacgtgttctacacagagccttatgtactgggccacagaataagcagagctgggcagctcctgctgccaaagtcaacatgttcaggctgcccggcctccacaggcgctttcctgaaagctgcctgcagagagaagggtggccagggcaggaggcaggatcctgaagctgcctgcagagggaggggcggccagtgcaggaggcaggttcctgaagctgcctgcagagagaagggtggccagggcagaaggcagcagcacaggggctcgggcccacgctggctgtccacacccagggccacgcctccatgacggtgccctccaccacatcccctctcgtgtgtgctggtgccaccacgggggcccagggacctttttgctctacttctctttcaaacttgcagccctgtgccagcagccagcactgccttcagaatccctgcacacagcggtgggaaaccttgactgcaccggaagaggagcaggctgccctggctgggccagacgctacacatcttgctgtcgagatggtctacatttcttccttttttctttttcttgtaatccttctgtcacctagagctggagtgcagtggtgtgatcatagctcactacaacctctgcctcccgagctcaagagatcctcctacctcaacctcctgagtaaccatgacgacaggcacacacaaccacgcctggctaatttttgtattttttggagagatggggtcttgccacgttgcccaggctggtctcgaactcctgacctcaggcaatcctcccacctcagcctcccagagtgctgggattacggccagtttacattcggaacccaccactatccccttgttgacagtaagcacatcccaaatcatttttcccaatggacaacacaaataaataattaagatccttattctagagtggggaaaaaaagagactagaattctcagcagaacttgaggaatccaatggccagtaacgaagatgcctcccagagtctcctggccatgttccatccctcccctcagccaggtactggggtgagatgcctcccagagtctcctggccgtgccccatccctcccctcagccaggtactgggctgagatgcctcccagagtctcctggccgtgccccatccctcccctcagccaggtactgggctgagatgtctcccagagtctcctggccgtgccccatccctcccctcagccagctactgggctgagatgcctcccagagtctcctggccgtgccccatccctcccctcagccaggtactgggctgagatgcctcccagagtctcctggccgtgccccatccctcccctcagccaggtactgggctgagatgcctcccagagtctcctggccgtgccccatccctcccctcagccaggtactgggctgagatgcctcccagagtctcctggccgtgccccatccctcccctcagccaggtactgggctgagatgcctcccagagtctcctggccgtgccccatccctcccctcagccaggtactggggtgctcaggccacaccggaccctccatctccttcctcctaccttcctcttcttctcaacaaaatctaagcaagttgtaaatgggccttctggtggcaatgatgtattaagacacgcagagcccttaccccatttgctacaggaacccaattacatctgggaagaaacaagcaggacaggaaaaaggtacattggtgtttttgcatccataaagttcacttcaatttaaatagaacttactgagtactcttttgctagatccaggcaaaatgtttttcaccctcagatacaaaaacatagaggaaaaaattcccttaagccagctgtaaaaaatgatggtattaaaaaaataaaacactggccccatgagaatcactgtagttaacaaaagaaatacagtaaccgcaatattataacctacaaacaaaaagccattctcagtcccccagcaggacctctccatgcctcccaggtcagcagaggacagaggacagcagaggtcacaggtcagcagaggtcccagcactcagagccggattccagctaaaagcacacatgagggaaaacagctgacagccagagctcccaatggggagctccaatgttccaaaccctcccccaggccctgggactctctgcccatcaaccagagcctggagggggagggagtaggagggggcgccgctcagccacaagtgcccattttcacatgaacaggtctaacttaaatgacacagcatcttctataagttactgcagtttaaagatgcctagccacagataattcctcagaactctaaaataaaaactgattctactaaacaatggagttatttatcttggcataattactacgcatatttttttgataataatggaagtatggtgttacctgtttctaaatcttaacaaaaacttatgttgaaaatggaagtggactgggcgcagtggctcacgcctgtaatcccagcactttgggaggctgaggtgggcagatcacgaggtcaggagaccgacaccatcctagctaacacgaggaaaccccgtctctactaaagatacaaaaaattagccgggcgtggtggcgggcacctatagtcccagctacttgggaggctgaggcaggagaatggcgtgaacccgggaggcggagcttgcagtgagccgaggtcgcaccactgcactccagcctgggcgacagccagactgtctcaaaaaaagaaaaaaataaaggaaatggaagtgaactcacagtggcacctacaaatcccttacagacctgcaaacctagtcctgtggctgtcagcagccgccaggaacccctggagcattctacggcaggacacagaaacagccgacaagctccccaggggtgagggtgccagggagactctgcactcccacaacgccctaggatgcagaggggcctgcccagaaagagcctctctctgctttcaaggccagactggggggaggcaggagggtggtaccaaaaacagcagcccttcccctccccacctccaacctggccacccagacagggaccccagcacagcaacagcaagcggagggggctcggctctggctgagctgacttccagcccagccaccaccacgggcctgcacaccctccgccacgggcctgcacaccctccaggatgccacaggcacagctgctcggactgcgcactcggggacactgaggcgcacgatcgcacctgccttacaagttcaacatttcagcaagacagaacctgattacttttccatcttaaatggagatgtcaattaaaaatgtaaaacattaagtccaagcctcttttcatatgaacaacactgcctttgttatcattaacaaaccactttcaaaacccccaatttttgggaaaggtaatttgaaagtcccatttcacagcaagcacaaatggaacacccacatgttgcaagggtcagcagtccgctgtcactcacggccacactcactgggaaccgcgtgctggggtcatcgggggtcacgcagccgcaccgcctgagaggactaacccttctgttttgccaagaaagatgtcagcttcaactacttttatactggagaaacaatttacaaactaaaattgttttaaagcctctattttcatgcagttttgtttctgtaaagtgttatttaatctccaaggaagtctttacagtagatacgaccgtgaccactgtcctgggtaggagactgaggctcggagagtggaagggaggggccagggccacagagctagcaccagtcagcccatcacacaaggctgtcggggaccctatgtcactgcggccacacctggcccaacctcagggcaggaccagcctagaatccatccaagctgggcacctaagtcacgcccagatgggagagaagagcacagcaccgtgtactgaagaagcgactgtggatctcatctcaacggctcacattccaccccaaggaatcaaagtgaaacacgggaatgacacaaataccaacatgaaaaatatcagagcacctgtaacattcttattcttctttatttgggacagggtctcaccctgcggcccaggctggagtgcagtggtgtgatcatagctcactgcagcctcaacctcctgggctcaagtgatccttcctccccgctcagcctccccaagtagctgagaccacaggcgcatgcatgccaccatgcctggctcatttttttattttttgtagagatgcggtctcgtcatgttactcaggctggtctcgcactcctgagctcaagtgatctacccaccccttcctcccaaagtgctgggattacaggtgggagccactgcacctggccagctattctttttttttttttttttttttgagatggagtctccctctgtcgcccaggctggagcgcagtggtgcgatctcggtttactgcaagctccgcctcccaggttcacgccattctcctgcctcagcctcccgagtagctgggactacaggcgcctgccaccatgcccggctaattttttgtatttttagtagagacggggtttcaccgtgttagccaggatggtcttgatctcctgacctcatgatccacccgcctcggcctcccaaagtgctgggattacaggtgtgagccactgcgcccggcaagctattctttttttaaaccctgcattttaatgccagataaaacaatggagaacaggcattcaagaccagcctggccaacacagtgaaaccctatctctactaaaaacacaaaaatcagctgggtgtggtggtgggtacctgtaatcccagctagttgggaggctgaggcaggagaaactcttgaatctgggaggtggaggttgcagtgagccgagattgcaccactacactccaggccctgcacaacaaagctagactctgtctcaaaaaaaaaaaaaaaaaaaaacaatggagaaccagcctcagtgaggtcctcaggaggccctcacatgcccatgtgggtcacggcgcctctggtcacactgcgcccaacctctgctcagcagggcctctctgtagcaacactgcagtctccctgatgggaggccacaacagacctcatgctaagggccttcctcgtattcaatctaaccaccacaggcaaacaaaagacaaaatcaatactgaggatctatagttcacaaaagtgacaaatggcattaaacaccttagattattactgtggcatggtcaaaaatgccaacatttcctatgtcatcaaacctaagtatcagtacatctattgttctcaatccactagagtgctagacatttaggccaattccaggtcctgtcagcagagttgctgatagcttgctcccctttaatcagagaagcctgtattttgaatccatcgatttttttttttccccagagacagagtcttgctctgtcgcccaggctcaagtgcggtgttgtgatcttggctcactgaaacctccgcctcccagttcaagcaacgctcctgcctcagcctcccaactagctgggatcacaggcattcgccaccacgtccggttaatatttacatttttaatagagatggggtttcaccatgttggcaggctggtctggaactcctggcctcaagtgatccacccaccttgacatctcaaagtgctgggattacaggcgtgagccactgtgcctggccactaattgctgattaataattttatttttcacactagtaagcagcattttggccaggtgtggtggctcacacctgtaatcccagcactttgggaggctgaggcaggaggattgcttgagagcaggggttcaagacaggcctggacaacgtaacaagactctgtttctacaaaaaaaaaaaaaaaattaaaaaaagaaaatgcagcattttgcttttccttgtcatacattaaggtcagcagtatccttttcacaaagaggcacagctcagaccctggggtgtggggtgctccctcatcgctgccccccttttcccatgtacctggcccctccatggcaccccttttatcacaaccaggctcagtccacctccagatcttgaaaaatgtctcacctgatcacaaacatgcccactacccaggctggcttcattctaactacaaaccatcccacagattaagagaagacaattctagacctattttcaaggatatctcagattccctttccttcaaacctcacctctatttccaaggaaagaattcagtcatatgaaagaaagcagtcaggtgtattttaaagtggcctgactccaggcgactgagataaggaacagatacaccaaactatgaagctcccgaaagaagctgcaggaaaggttctttcacgtttgctgggagtaacaacacaaaacagattatgtatttttggaatgttcactttaaaaccatgactcacacctggccaaaatatgaaaatttaatttagccaagttttctcttcaactgctgtcaatccacatatcagagaaaataacctgccagttcaccatgcgtctctggaaggagggaggactctgccctacagcgacacgtgcttgctcagagccaaggccaaagtctttttggagactgctgccgctcctctcaaaaaacatgccagtgactcccaggaggaggcaaggagtcagggctggcgaaccaggctcccactccttacctgccaaccatacacactggtctccagctcctaggaaaagccagaatagccatctagagggttcagcaacagcactatgcccagaagcacaggacagcccggcgagaccaccaggaacctaacaagagcacaacagctcccaggatacagaatcctcatccaaggacaacccagcaagaccaccaggatcctaacgagcagaacagctcccaggatacagaatcctcatccaaggacaaccaggcaagaccaccaggatcctaacgagcagaacagctcccaggatacagaatcctcacgcaaactgttaacacaacatgctcagagcacacaacacacagcacagggtgggggtctcagtcatcaccagaccatctgaggatgaagaaaattaaaggaggacaagaggaaataaacttcttttataggctattaacaacctatttaatttttcagcagatttcttctcactgtgacaccaaggatcccattcattaatccaaaaatgcttacctgttaccactctgaatacactctaagtgaaatccagaacaaaattcacaacatttcgacaaaactctatcaagtccaagaaaaccaacctggacactcacgcattattttgatacttatttttacaaatcaatgacaaaaacataaattgatagagaatgcagtgagtatttaccgattccatagctgaaagtcagtgctgacgaggactgtcttttaaatccaatggaggtgtgtcccagagcagggctgtatatattctgaaacaagagagtgagattagctcatgtcaataataatttcagcctcagttctttcatcgctctcgtctccctccatttggtccacacggtttattccatcgcccttcctctcccatgacccactgctcagctcctggtcactgtgccaaggccaaaacttaacttcattcatcaaatacctttacgtcacaatgcagcaattgcaacaacttaaaggtaaatccaaagtccagcacaaaaaagagtagatgacactgatacaatcttgtgaaatcaccataaaaccagattttagaggctctggggctttttatacgtaagaaaccaaataacccaagtgggcaatctcgccacagaaacaaaacattaccagtaagctaagtttttaaaaggccttttttttttttttggagacagagtttcactcttgtcccccaggctggagtgcagtggcgtgatctcagctcactgcaacctccacctcccctcctgggttcaagcgattctcctacctcagcctcccgagtagatgggattacaggcgctcgccacccacccccggctgatctggacctcctgacctcaggtgttccaatcacctcggccttccaaagtgttaggattacaggcgtcagccaccatgcccagccttaaaaggctaattttaactttaagaagcatattaagttttaaactacataaaaggtgcaaaaaaagataaggtggttttcatttccactgagtattttaagaggaaaagattatactgcagtaccatttttttaaaaagctgaataaagccatgcatggtggctcacgcctgtaatcccagcactttgggaggccgaggtgggcggatcacttgaggtcatgagttcaagaccagcctggccaacagggcaaaaccccgtctctactgaaaatacaaaaaattaaccaggtgtggtggcttgtacctgtaaccccaactacttgggaggctggggcaggtgaatcacttgaatctgcgaggcaaaggttgcagtgagctgagactgcaccactgcactccagcctgggtgacagagcgaaactcgtcttaaaaaaaaaaaaaaaaggcagctgaataaaactatataatttccctgaagagctctggggactccaagaataaaacaaaccagtctaaatgggggaaaaaaaatctatacccatgttacttcagtcccatccaaacatcaggctctcctccaactccaaacacttccgtgtgcagaaccagggaaggaagcacagacaggattgaaggcagctcccaggacagggcttgctggtgcagggttccccggctctgcacttagcatccgagagaatcgcgtgtttcctgagcaacactcctggcacatgcgttttgcaaagatggagtgaggtttttcctccttacactcctggaagatggagtgaggtttttcctccttacactcctggacaggattgttcaaagctgccattaacctcaaggaccattaaaaataagtgtgtgatgggtgcgctggctcacgcctgtaatcccagcacttcaggaggctgaggcaggcggattgcttgagcccagaagttggagaccagcctgggcaacacggcgagtccccatctctacaaaaaattcaaaaaattagctgggcatggtggcgtgcgcctgtagccggagctactcacaccactgcacagcagcctcaatccatcaatcaataaaaataaatgtgaatacgcagcttctagtcaccacacagcctggtttcagtgaaaagcagcaagtgtgccacgaagctttccgtaaaagagctcagagaggggaagagcatcagcagcaggaagccagcgaggaaccccagcatcgacctccagagtcctgagagcactcaaagcatcatgagtccaacgatttgcaagctcactgccactggcatttgggttcagcgcgccaacagggttgagcagcgtcggtcttctagatgccagtaaggccacccagcaaatcctggcaaccaaaaatgtctccagacgatgtccgctaaagggcaaaacacgccggtgagaactgctgctttaatgcagctgctgtttcccatgtatgaagaaactgggcccaaatcaggtgaaagtgaaaaacatcagttaaaagtgaaacaaaactcagttttctgttgtcttagggtcccacagggtatggaaagcaagttgggaagagaaaattctggtctgaaggtcttttctttctgactgacagacaatctcagtaactgatcccattatctctggaagacagtaccaatccagagcctctaaaatatttggaataaacattacagatttttcttaagagacagggtctcactgtgttgccaaggctgggaatggagtggtgcaaacacagctcactgcggcctcaacctcctgggcccaaggggtcctcccacctcagcctcccaagtaaagacattttctaaggtgtgaaaaaaagcttcatttagaatacatgttcacatcaaaaccaccaccacgactataaacaagctatgttgtcaaacagaaaagcaccaggctacacttcttactgtcagctcctgcctacagcaactcaggaatcaacaggcctgtggaggctgagtgcagacagagaccatggagacatgaagggtcagtgtgtgatgacggagtcagggagtcagggatgggaccatcacccatccatgtctgggggtggggctgagacacgaagggtcagtgtgtgatgacggagtcagggatgggaccatcacccgtccatgtctgggggtgggggtgagacacgaagggtcggtgtgtgatgacggagtcagggatgggaccatcacccgtccatgtctgggggtgggggtgagacacgaagggtcggtgtgtgatgacggagtcagggatgggaccatcacccgtccatgtctgggggtgggggtgagacacgaagggtcggtgtgtgatgacggagtcagggatgggaccatcacccgtccatgtctgggggcgggggtgagacacgaagggtcggtgtgtgatgacggagtcagggatgggaccatcacccgtccatgtctgggggtggggctgagacacgaagggtcggtgtgtggtgacggagtcagggatgggaccatcacccgtccatgtctgggggcgggggtgagacacgaagggtcggtgtgtgatgacggagtcagggatgggaccatcacccgtccatgtctgggggcgggggtgagacacgaagggtcggtgtgtgatgacggagtcagggatgggaccatcacccgtccacgtctgggggtgggggtgagacacgaagggtcggtgtgtgatgacggagtcagggatgggaccatcacccgtccatgtctgggggtgggggtgagacacgaagggtcagtgtgtgatgacaggaccactgcccatccatgtcttggggcaggggtgggggtaaccaaaaccagaatccagttaaaacaacagggagttgcttctacctatggaaatggcaacaggacaagatgataacccaggtgctaaggagtcggctacacgcattctgtgttaggaaacccaggaggtactaatggcggctctctctgaatggtggagcaatgtgaggttttaaatgctcttaccactctggactccttactctcatcaacccctttaagtgggttatttgccacgttagggatagggaaagaaaattatttaatacaatcaacgggtaaaaagttaaagttacctaagaagaaagagctctaggccaaacctataatcccagaactttaagaggccgaggtgggaggatcacttccgcacagaagctcaaggctgcagtcagttagggtggcaccactgcactccacctgggcgagcgactgagaccctaagaatatccaaaccattaaaagaatttttttacagaatttttcttttaaaaaaagcaattttaaaaaaaaggatcttggatgttatcaccaaaaagaagtggtatttgaggggatggacacagtaaccaccctggtctcatcggtaaacaaggcatccacggactgaggcatcctaccggactccactaacaggtgcgactatgggtcagtaataaacacacttttcaatatgtcaagtaataacacgatattcgcgctgacccaatcgcaccccacctctttcaacgccctgggctctcccctcgctttgttgcatgagagctgctttactcactgctctcgacgaacagtcacagccacgagcaccgtccgaaacagaatcacagcctccctgggaaggaagctgggcagacctgatgcttatttttggaaaggaacggaagttcaagattgctcatgtttttattacagtctcccttttctcccctaagagaatcacaagtttcaggagactctgactgacacaactgtattaatgtttaattcactcccactttaatcacttttttctttttttctttctttatatcaaagcacatcaataatcacttttttcaatcaggagatctacaactgcttgctaaccatagtcttcaatccgctaagatgagcaattctttctgtccacactgactaaccccaactgacagcagagaaaaaccacgaggcctgtggctgccccacaccgctgctccttcagacaaccaagggccacggtggtttcacagctgtgagctcaggcccctcagctccctcccgtgagccaccttcccaacaccctcagagcccaggagtccatgttagcaaagacaggtccctacactggccttggtctcaaaacgctgctagccagagctatgaccttatgcaaacaatgattttcattcgcgttaggctgggtgggagggtccacaggggagccactgacgatgggcatctgcccccgacactggctgactaaccagcaccattaaccctgggctccgaacggcagtcacaccagcctgtctcagggccaggtctgtcttttccctgcttcccacagaacggcccgcagtgcattcctttcatgagtacaggagcatacggatgggttttaagagactagtgcggagctgtggctttcttgacaaatactttttcagtaacttcaaatacatgcacagagaaggcatgagatgtgtggttagagttaacctgaaagcacaaggtggtgcctgcagcagcaggcactcagcacctgacccaactcaactcaaacatgtgagcccaccattactagaggtcaaaaatggtccaataaactccactcagttgttcacagctgttttattcataagcaccagaaactggaatcagcccagatgtgcttcgatggtgtaagaaaacgttttaaatggtccgttttccaggcatgataaatctacgcaatggcagccagcctgcggatgtaacaaaccgcacggctcgtgcacctagaaggtcacaataagcgaacaaaatgtagaagaggggtcagcccataaatgggaagaaagtttcagtattgggaaatcaaaacttaagcgggtaagaggacagggtacaaccttgtaagcgggtaaggggacggcgtacaacgggataatgaaactcaggcgacctccgggaagattgtaaccccatagtactcgaccagtgaggaactgggggagggacttgcattagaggagataaactacctgctgtgactgccccgggtgtacctgcctaccaggcacctgatcttgcaagactgccattaaaaatcttgcttcctggctgggcgcagtggctcacacctataatcccagcactttgagtcaggcagatcacctgaggttgggagttcgagaccagcgtggccaacatggagaaaccccgtctgtactaaaaatacaaaattagccaggcgtggtggcgcatgcctgtaatcccagctactcgggagactgaagcaggagaatcacttgaacccaggagacggaggttgcagcaagccaagatcacacctctgcactccaggctgggtgacaagagcaaaactctgtctcaaaaaaaaaaaagagagagaaagaaaaaagtctcatttctgctgttctgtgtgtctccaagcccagtctttgggtgtggacgggtgaatgtgtgtttctcaccatggataaataagctgagtccacccacaccacggagaccactcagcaacaaaacagagcgaacattacgctgagcaaaaaggccaatcgaaaaggttacatttctacgactccatttatatgacactcttatgacaaatttttcaaatggaggacaaatcagtggttctcaggggttagggaccagggtggggagatgggctggaaggggcaaatgtggctagaaaagggcaaagggccgatccttgcgattatggaactattcagcaccgcaacacggcagggacgggggcccccagtggtgaacacgcacagaactcaaatcaatcaatctctctctctaacacacacgtacaagtaaacttcaggcaacctgagtaagaccggtcagcgataccgtgtccacatcctggctgtgacgttctattaaggccacagttctccaatgtgttaccattcgaagagaggaggagactggccgaagtgtacaaagggctctcaaggatttcttacaacaaaacacaagctcaaactatttaaaaaaaaaaaaaaagtccaaaaaagaaagagtccaatattgacaatttcatatggttttatctagcaccaactcactttatcctcacaataatcccacagagtaggtatcattattatctcccctttgcacatgagaaaactgaggccctagaagtgtgagaaatttagtcaaggtcacattttaaatggtggggccaagacctgaaaccaggctggctggctccagtgcccacactcttcaccacgatcagtcttgaaactggaaatggaaaacatggacatgaatctgctattattatggcttaaaaatcttacaatgtaactttagaggacttaaagggaacactaaagacctaccatccagcctcatctcattttagttctcaatcaaaaaaagacacagccaattggattccactcccacaatggtgccaggagccccacaatcccaaggccagctggtgcagacaggtcacctatccactctgatcaaaccattctcctgacctcggtcggtctccttcgttttttcaggttgggggcggacaaggtgggccggttatttcgattttttcgggctgggggcagagaaggtgcagttatttgtttcctgtttctggtgtttcttttttaagggtggggtgctattcatttcgttttctctgatttaaagtgaaagagaaggctccagggaataaaggcaactacgcaaacttcagaactgaggtgagcctgaggaggaactagaaggaaaaccaggcttccttcttcagtgcaaatgtttctttttactacaggaaaaaacgaaacaggaaacaaaatgaatgttcccaaacaattctctttataccatttagcagaaaaaggtgcaaagtggatgaatgcagaacgagaacaagggggaacgatttcacacaaccgttcttccctttccataatgcctgccctgataggaatcaaactcctctgctaaagaacaaaagccaactatggaaggcaggagaaccttcagtcctcagaggaggcatccgactcctgccaaaaccttcccttcctcaccggatccaggggaatggcaaaaacaattcgtgtttgaaagtaaacagatacacagctataacaaaaaaaacaaaggaagctgtagatcagaaactgggaaatacctgaaaattagaggaggacaaaggcatgaaatcaaactagagaaagtgacacaaaagccaacagtgaaaacagccccaataacacacaggagaaggtggaggaaggacagtgctggactgtgcaatacctgcctccctcccgcaggaggcccggctccacaagaccccaaccagcgccggccgagttcacaagctccctgagcaacaaacaccaactccctgcgtggcttcactaaaacaagccttgaaagggaacaagaggctctgatggtcacttaaacatcacacacacacacacacacacacacacacacacacacaaatctgaaatcctgaccaatgaagacataagaccaacctttcagaaagcctaaatcaggcgcatatagatgaccaatttatttctagctcttagtaaacccacagaattccaaatcagcatcacagtctaatggcaaaactcaaaaggaaacatgaatatactgtgatctacttgtcttgagctcactgttggcctcaccattttatgatcggcgtcatggacactgggaaacagaaaagacggagaaatccgggaagcggctgtttcacttcagtgtgaagctcctactcaacaatcgcttagttatttgtgacctctcacaacactcatctgttctgtttctacaaaatgaataatccaagtggcagtagacatcaggacacctgttaccagcctgtcttttgccaagtaggaacctcagaatgagatacaactccatgaagaaccatctcttggtatgcaacaaggtcttcagtcagtcagtcaatcaattcagcagagctgcatgatacaagatcaatatacaaaagtcagctgtatcatcatcatacacaagcaatgaacaatctgaaaaagattaaggaaacatttccatttaaaacagcatcaaaaagaatatttagcaacaaatttaaccaaagaagtgtaaaacttgcaccctgtaaccacaaaacactgttgaaagaaaccgaagacctaaataagtggagggaaaaaatcccatattcatggatcaaaagacacagtgtctttacgacagcaacaccccccagggtgacctgatgattcagtgcagtaactatcagaattccaacggccttttttcaaaagtgatccaaaaatctagatggaattgtaaacctcttacatactacaacttacagaactatacaactttttcttaaaacttttttcagagtagaaaagacataattaaaatgtctaggggccggggtggtggctcacgcctgtaatcacagcactttaggaggccgaggcgggaggatcacttgatgtcaggagtttgagaccagcctggccaacatggcgaaaccccatctctacaataaatacaaaaaaattagctgggtgtggtggcacatgcctgtaatcccagctacttgggaggctgaggcaggagaactgcttgaacccaggaggcagaggttgcagtgagctgagatcgtgccactacattccagcctgggagacagagtatgcctcaaaaaaaaaaaagtctagtaatcgtatgatgccaggtttttctaaaatgattatttttaattattaagggggcaaaataaaacaagggcactgatttgacagtttttttaaactctttagtttgaaaggtttaaaattcttcaataatctagtgcctctaatcccagcactttgggaggccaaggcagatggatcacttgaggtcagcagtttgagaccagcctggccaacatggtgaaacgccatctctaataaaaatacaaaaattagccagacatggtggcgcgcgcctgtaatcccagctactcgggaggctgaggtgggagaatcacttgaacccaggaggcagaggttgcagtgagccaagatcgtgccactgcactacagcctaggcagcagagcaagactccatctcaaaaaaatagattaattaattaaaataaaattctttggccgggcacggtggttcacgcctataatcccagcactttgggaggccaaggcgggcagatcagaaggtcaggagatcgagaccatcctggccaacacggtgaaaccccgtctctactaaaaatacaaaaaaattagccaagcgtggtggcgggcgcctatagtcccagctgctggggaagctgaggcaggaaaatgttgtgaacctgggaggcggagcttgcagtgagccgagactgcgccctacactccagcctgggtgacagagcgagactacatctcaaaatgaaagaatgaatgatgaatgaatgaataaaattctgcaataaccaacataacattatttcctttaaaaatacaccactgtcataggccaggcatggtggcccatgcctgtaatcccagcactttgggaggccgaagtggatggatcacgaagtcaggagttcgagaccagcctggccaacatagtgaaaccccgtctccactaaaaatacaaaaattagccaggcatggtggcaggcgcctgtagtcccagctactcaggaggctaaggcaggagaatcacttgaacccaggaggcggagcttgcagtaagccaagatcgtgccaatgcattatagcctgggcaacagagcaagactccacctcaaaaaataaaaataaaaaaataagaatacaccactgtccctgaatgtgcactgttcttttaatttagaatgtgagcccacaatgatttgtacagcccaacatctaagatgcaatgaacagaatgtaaatgggggttggggggagggaagggactacacagcttctgagagaacagcaacgtccctgcagcgtgggattctcaactctcacgctcagacgttctagtacacagcagggactctcaactctcgcgctcagacgttctagtacacagcagggattctcaactctcacgctcagacgttctagtacacagcagggactctcaactctcacgctcagacgttctagtacacagcagggactctcaactctcacgctcagacgttctagtacacagcaggtactctcaactctcgcgctcagacgttctagtacacagcagggactctcaactctcgcgctcagacgttctagtacacagcagggactctcaactctcgcgctcagacgttctagtacacagcagggactctcaactctcgcgctcagacgttctagtacacagcagggactctcaactctcgcgctcagtcgttctagtacacagcagggactctcaactctcaggctcagacgttctagtacacagcagggactctcaactctcgcgctcagtcgttctagtacacagcagggactctcaactctcaggctcagtcgttctagtacacagcagggactctcaactctcgcgctcagtcgttctagtacacagcagggactctcaactctcacgctcagtcgttctagtacacagcagggactctcaactctcacgctcagtcgttctagtacacagcagggactctcaactctcacgctcagtcgttctagtacacagcaggtactctcaactctcgcgctcagacgttctagtacacagcagggactctcaactctcacgctcagacgttctagtacacagcaggtactctcaactctcgcgctcagacgttctagtacacagcagggactctcaactctcgcgctcagacgttctagtacacagcagggattctcaactctcacgctcagtcgttctagtacacagcagggattctcaactctcacgctcagtcgttctagtacacagcagggactctcaactctcacgctcagacgttctagtacacagcagggactctcaactctcacgctcagacgttctagtacacagcagggactctcaactctcgcgctcagtcgttctagtacatagcagggactctcaactctcaggctcagacgttctagtacacagcagggactctcaactctcgcgctcagtcgttctagtacacagcagggactctcaactctcaggctcagtcgttctagtacacagcagggactctcaactctcgcgctcagacgttctagtacacagcagggactctcaactctcacgctcagtcgttctagtacacagcagggactctcaactctcacgctcagtcgttctagtacacagcagggattctcaactctcacgctcagtcgttctagtacacagcagggactctcaactctcacgctcagtcgttctagtacacagcagggactctcaactctcacgctcagacgttctagtacacagcagggattctcaactctcacgctcagacgttctagtacacagcaggtgcgctgtcctttaacaaggacaaaggtcaacaaacgccccttggatgaatggctgattggcaggcattccacactgcaggctctgtccccgcccagcagacttgtcccctatcttgaaacactacttttccatttcattaatgcaacctgatggccggccactgtaacaaaagaaacatcaccaaaatgaattgtttctttcttaagacaaaagggagtttgctcctcacatatgaccttacgcagtttctgtctgagaatcatcatgttcgtcagccctgcctgtgctctcctcttcccactgtgcttcctcctgcatcacaaaggaaacccctgtgagcctgggaagtgggtgcgcaggcggagaaacagaaacggccactccaggctcaacctatccatcccggcctcttcctaagaccaaggcgctgctgactcaaccctgcttccagaagcctagggttaacatctgctccttcctcctgtttgcattcagtgaaatcctctcctctcccaggagtttccacataaaacctgcctctttgtttattaagaattgtttacagaactctcaagcagcaaaggcaaagtacagaagataaataagagcaagctggccggtgcgtgcgactggatggacaacatctttacccacatgtctgcatcagctctgcgttgttcaccgacaaatcccgtgtctggaagagtcctggcaggctgcacgggctggagagagagcgagctggtgagtggctgcccctcccatcaccaccactggccacaccatgatgatcacacacccaggcacacccactctgtgctctccacgcatcgcctcattcaacccccacgacagcccttaacagatgccacctctgtgtttcttgtgagaaacatggaacataactggcactcatctagcatggtctcgcagtagcactgaacctacaaaccactctcttcccaggcttccaccccaccattcccggtttctcttgtgaactttgtttccattttgtttcacttgctacatctccttcctccacctcctccctcaatgttgtcttcagccactgcaggggcactctcacctgcctctggctttaacgacgtgctgctgaatcccagctctgccaatcagagttgaacccactgaacccactgcaacaatgtccaactagagacactgtcaatcagagacaatgttcccaccttactcggctctcctcacacaggctgtgcacatacagagccctcaccccactccttcctgtatcccctgccttgctgcagggcaccactgtctaaccctccaaggcagaaaccagctgcctcctcctccctatcaaaagcccacttataaatcctgtccatttccagctcccccccatcactgtcactcctccctactgcaaccgctctgacttctagttcaagagtgtctcagtatttctttacctacatcatcataacaacttaattatctccacctccagccacacacaccatcaacttattccccacagtgctaaggggagaatttgccacatctggtcacttatttacacctcagtctggtgtgcagaagtcactgggctaacaaggaatatattcatgttgtacatcgtgatgcagtacacacacacacacacacacacacacacacacacacacacacccctggaaaataaaagcttcacaggacgaaagcttccactcctacatgggacacactccagtgtttccccaggctggcagccgctgtttgtgacctcaggacccatcgccgtggcagccgcctcccagagcccgtggcatgcactgtgttgaggggtgctgtctggctgcctccccagcctctgagcaaccgcaaacaccttccagtttaggagggtccctctccatcttcctagaatgcccttttctactgtgtccagctggcaaactcctattcattcttcaaagtcaagctcaggtcttgactttcttccttatacttctcaatattcttcaaattctctacggagatatgtattgcttttatatttttatactatgtcaccaccatacccgagaccttaccagtcacacactcacccccattcatattctatcacggtataatcttgagcccaggagttcaagaccagcctgggcaacacaatgggaccccatccctataaaaaattaaaaaatttggcatggtggtacacgcctgtggtcccagctactcagtagaatcacttgagtctctactcaggagaatcacttgagcctgtgaggtcgaggctgcagggggctttatcacagccccacactccagccatgggtgacagagaccctatctctctctctctctctctctctctctctctctctctctctctctcctctctctcacacacacacacacacacacgaaatatatggacacaggccacattatatacaagcattgccataataaaaacagctctcccttggcctctgagcattttacccttttgatccattcagcttctttagaacagatggatattcaccataagatgtagtttatggacaagagtaatttggaaatgaaaaaggaagacagtaaggaggcctccccttcaagagggtttcatgacaaggcccagttgagtggccatgactggccggatcctttggccctaacatatggatccctccaggctctttcagtctgctaacctacaagttaattagtccatttctaggaagaaagtgtccgttgtctcctctgcagactttccacttcctgacagcacaggaacctaacagcatgccaagttcagactcctttttctttgcacctcactaccaccgacaggctttcaaacatactattcagaacagagacacggcgttggccaccagtcccagctccagcaacactaaaaggcctccctaaaggagcagcaggagcgcaacagagaagaacagggttggacgtgggggctgggcacaccaccttcaccagagtaagagagaaggaacgggcttggacgcagcagggctgggcacgccaccttcacgagagtaagagagaaggaacgggcttggacgcagcagggctgggcacgccaccttcacgagagtaagagagaaggaacgggcttggacgcagcagggctgggcacgccaccttcacgagagtaagagagaagcaacgggcttggacgcggggactgggcacgccaccttctccagccccagagccccactgtggagagaaaaggggctgctctctgcctcagaatccaagaactcctgagaaaacagctacatcgacatctggtattaacatttgattgtttaaccacactataagggagaaggggacatggacactggcttctaaatacagaagtttccagctcccagctggttactctgagaagatgcccctagtgtgtcacctacagagaagggaggatgcccacctaccctgcctggcctgcaccacccactagaaataaacaacaggccccaaatgcaaacaggaccaagagaagggccatacggcagcagcaccccagtgcctccaagatgccactcacccatggtgcaccctacacacactcacctcctcaagacactatggattctgtgtgtctgggggtgaactgcaatttttttaatgttttccaagtaaatctaatttaaaaaaaaatcactgatctagcccttcctcacccaaactcccagtcatacagttgtcgaaataatgaccataaagcaattcttctctaacttgagaattctcatactcttcttctccacgcaagtcggaaagacctagtctgagaaagaaagccataaaaatgagagaatccagcgaagtcgctgcagccaggaggagcagcaccgcgcagtcctgtgcctcacccctgcccaggccacctgagccccacctgtcacagtaaggctgcagaagcatgcggctggtcagcagctaatcagcagaaggaaagctggcccgacaatccatgcctataaattccacaacagatgtctcctgaggtccaaaatctgctcttattaaagagtggcgtgtgggatgggcagagactcacacagccacaccacacacacaaggtctcaggactctagccaaggtcttctagtttgtagtggcctcatgtttgatgagcatctaataacaaagacaggaaagcactggatggagacgcggcgaggacactggctgtctggggcagccttgccctgaggaagttatgctctaactggtgagactgcaccaaggcacaagaaaacccacgacaaactgaagtgtccatgcggatggctaggtgaagcagggcgcaggcccaggtgtgaacactcaactgctgggagcccaagaccaactgatacacccacagccaccagctcttcatgagaggtgaagccagctgggcttctgggtcgggtggggacttggaaaactcttctgtctagctaaaggtctgtaaatgcaccaatcagcactctgtacaaatgcatcaatcagcgctgtctagctaaaggtttctaaactcaccaatcagcactctgtaaaaacgcaccaatcagcactctgtgtctagctaaaggtttataaactaaccaatcagcattctgtaaaaatggaccaatcagcactctgtaaaatggcccaatcagcgctctgtaaatggaccaatcagcagtacgtgggcagggccgaataagggaataaaagctggccacatgagccagcagcagcaacccactggggtccccttccatgctgtgggagctgtgttctttcactcttcacaataaatcttgctgctgctcactctttgggtctgtactacctttatgagctgtaaccctcagcgcgaaggtctgcagcttcactcctgaagtcagcgagaccacgaacccaccagaaggaaaacactccagacacatctgaaaatctgaaggaacaaactccggacacaccatctttaagaactgtgacactcaccgcgagggtccacagcttcattcttgaagtcagcgagaccgagaacccaccggaaggaaccaattccagacacattcacacgcagacgtactttcgttctgtcctgctgggagtccaagaccaactgactgtccactcaaggaacagaccaactgacgcacccacagccaccagctcttcacacacacacacacacacacacacacacacacacacacgctttcggtctgttcgctcaaggaacaggaagcctttttcacttcaacttctgcattcagttcaatgtgctggtgccgcccatcacctctaaatcaccgcaagtttcaagaacagccagttgtgtcctggagctgtgctgagcacgcccaccagcccagcaggtgctgctgagagcagagggttttgcagggtcacacattcttccaacaatatgactgcagaccccccagcaaaaggaaagattccccatttgggaaagtagactaaaattttcttctattaaaacatgataattcggccgggcacagtggctcatgcctgtaatcccagcactttaggagacggagatgggtggatcacctgaggtcaggagttcgagaccagcctggccaactcggtgaaacctatctgtactaacaatacaaaaatgagctgggcgtgatggctcagaacctgtagtcccagctacgtgggaggctgaggcacgagaattgcttaaacccaggagatggaggttacagtgagccaagatcatgccactgcactccagcctgggcaacagagtgagactcggtctcaaaaaaaaaaagataatccaagtttctcctgacagatgacattcatcaacaagagattcaagcagaaaagaccactgtctctaacagcaagtattatacaagagcctcaagcgacgtctgccttgggtgttgggacatagcaaacaggacggctgttccgcaagagcaggactgaagcaggcggaaatgaagacgcaggggcatcagccatcagagctcttcttcctggaataactattcctctaagctgctccttcagatacaaaataaaaagtaactctcaacactgacaagtcaacggaggacacgcgaaaaaccaaaaaacttttactatatttttgttttaataaagttattctaatcccctgaggtaactgtgagggaattaataactagagaactgttagagacccctgaaggttggacaatggtattgccgaagctttgtgttttgctcttcaataaacttatctactttcttaagctaactgaataaaatttaatatacatttatcaaccacatcttttaaaaagagagaaaagtaggaaactcaaagtagtttcctttaaacaaaagatggtcaaagttgatgaatttagaacatttgtccccaatatcctaaaaagtgacatacgaggaaggagatgtcacagaagaaaacgacaacacacacccaaacggcatcagcctgtgtgtgaccattttcacaacagggaagggaacgaagcgaacagatccatcactgaaagcgcagcacacaccttctaacctggaaatggagaaggaacgtccacttatgaagagggccaacaacagtggcctctcattccatgaaccaagcatgatgctaatatgctaatatgacagagaattttttaaaaagccaccaaaaaaataccaaaaagtgaaagactgtattgtttgccccaacatctgttttcttcactctaatgttcccaaaccagtgcagcaaacaggctggctcttcccgcctcccactgactcctccacacccctacttcctctctcctcattcacctcttcttctttctgctcttctgtgcctcccactctctcactgagcagcccctcacttcccagcatgccaccatctcccctgagcaaacagtcctccagagacagtcctccagagctctctccaacctgacatctctcccaagagcccactcaccagatgtccaaggggtttatgaaagccatggattcaaggctagagacgctgtccctcagaccagctctctccggctcttcctgtctggtagggaggctgtggtgccctggccactctcatttctcactggcctctgcacctcccatgcatccgctcctccgccatgcctctccactactcctaatgccactcccagctccagcaacccaccctccagggcacctcgacgctatgcccagttcaatctcctatgggtcagtgcagggcaatgcataatgcaaactaggcccgggggctgtggagttgggcagccatggttaaaatcattcttagtttcctcatctgtagaaagaaaaattcctggatacaaaatataagatgaatatacacaagtccattgtatttctagacaccaacaccaggcagagtccaccatgaaggcaagtggcagtgtcccaaggagagcccgctggccaggagggcaccgcaagcttggacacagcaggggcactggagatgggtccacgaaccgcgtgcgcagcccaggaggctggcacaactggtgtctgcatgaagactaggaacagctggcttcttatctcacaccatacacaaacatcaatttaggatacattaaaggtataaatgcaaagggcaaaagtacaaaatgtgcagaaggcgtaggaagctatctttatggccttgggatagggaacattttttttttttcaacacagagtctcactctgttgcccaggctggagtgcagtggtgcgatctcagctcactgcagcctccgcctcctgggttcaagcaattctcctgtctcacccacccgagtagctgggactactggcgtgtgctaccacatccagctaatttgtgtgtgtgtgtgcgtatttttagtagatacagggtttcactaggttgggccaggctggtcttgaacttatgacttcaggtgatccacccacctgggcctcccaaagtgctgggattacaggtatgagccaccgtgcccatccaagaaaattttctaaaaaaagacatactgggtcatgatggacagtttggaaggcattgcccccaagaaccaagcacagtcccttcgaagctaaagtattcaaatctcaagtcatcaaatgttactgcatttaggaggccgaggtgggaggactgcttgatcccagaagttcaaggccaaccagagcaacatgtgagaccgcatctctataaaaaattttaaaataaactagccaggtgtggggttgcatgcctgtgatcccagctgctggagaggctgagatgggagactgcttgagccaatgagttcgtgatcataccactgcactccagcctgaacgacagagcaagaccctgcctcaaacaaaaacagaaacaaaaacaaacaaaaattttaacctttctcttaaaaaaaacaaaaccaaaaaaaaaaaagaactgtattcttccattcatatagaagataaacatcacaatgggaaactccctctgtgtggcacgttgttcaaatccacatgcatgcacagtcccagagtcttctttcctacccgcagcactgaaggttcaaggaagtcccactgttttcagtaaactgaaaacttttttggaaaatgctgttttccagtatagacaactgaatcctaagcacaaatatataggacctctgaatatgtaaaaatttaaaagcagacaacactaaattaatgattttacttttaaggagataaaatgttccttgacttgcaatggggttacctcccaataaacccagtgtaaagtcaaaaatcctaagtcgaaccatcattaagtcagggactatctgtatacactttcagtgctaaaaactacaccaaagaaaaaacaagtgtcaaagttctccatgtaaaacagtgatccagggatatgggtgagaaaacccatctaaaatgcaatgtgatatttaggataaagctgaaacacaccacagcgcctcagcaattgaggctgtgaatacaaccacacaatcagcaaagaaaagcttgttctattcttcatctacaccactcacacacaacaccaaaggtgttctcagcacacctccatccacctcagatctattcttcatctacaccactgacacacaacaccaaaggtgttctcaacacaactccgtccccctcagaactctgtggaacgttttcattcccaatgatcaccaacagagccagctgtaagctcaactctaacactacccacagtgcagctgacctagactgatgggcggcctccggagaagtcaaagactccagctctactgcacacacccacagcaggagaggcctgtgtctctcacaggtgtggggtctgagccgcagcccactaccttaactccataatctgtgacttggctcttatgaggaagctgacaaagaatcagagactcagaggagatcacagcctttcaggactgaggtctaaaacacagaacctctagcccagtgctcacccgcaaccatttccctgcctcttcctacttctccagtcctcaaggggacaatggcagggttcacaggattcttcctccggaagaattcagtgtgctgtaattagaaatgaacattttatcaatatgttcacgtaaaatgtacatgttcccctggggggagggataaataacagtggaactaggaaaagcagaccaccagaaaatgtctcggtccagcgtggtggctcaggcctgtaatcccagaactctggaaggctgaggggggaggatcacatgaggccagaagttcagaccagcctgagcaacacactgaaacctcaactttgtaacaataaaaacagaataaaaacttagctgggcatggaggtgtgcacctgtagtcccaggcactcaggaggctgaggtgggagaattgcttgagaccaggaggtcaacactacagtgagctgtgagtaccaatgcactccaacctggatgacacgacaaaactctgtctcaaaaggagggggaggaggaggtaagagggaaaggaagaaagcataagaaaatatcaagcacaaactaagggccccaaaaaatccaactcacagcaacgtgggcagagccctggagaagccagaggacatccaggcaccacccagcaaggggctacagaaagggggccacctgcctccaagcctgccgggactgaaaataaatccatgtggcatcaacaggaacatctgtggctgtgtggcaatgcgtgtgagtgcgcatgaatcctggtgtggctggtgtgtgtcacagtcaaaacggaaagagagagcgcatcgtggtttataaaaaataagtttccttgcggccagacacagtggctcacgcctgtaatcccagcactttgggaggccgaggcgggcagatcatgaggtcaggagatcgagaccatcctggctaacaccgtgaaaccctgtctctactaaaaatacaaaaattagccgggcgtggtggtgggcgcctgtagtcccagctactcgggaggctgaggcaggaaaatggcgtgaacctgagaggcagagatcgcagtgagccaggatcgagccactgcactccagcctgggccacaaagtgagactccgtctcaaaaaaaaaaaagtttcctcgctatgcatgcgctaaaaccctctggagtgaagtcctaaaatatttaaatgaattttcattctgaagagactacagaacttctcaacacaggctctcttacacagactctattacacagacttttttaagatcttgcacatccaatgtcagaatatattccatcacccagcaacaaaagcagtcaggaaaaaaacttcagaaaaagaattattaaaaaatacgcaaacctggccgggcgcggtggctcacgcctgtaatcccagcactttgggaggccaaggcgggcggatcacgaggtcagcagatggagaccatcctggctaacatggtaaaaccccacctctactaaaaatacaaaaaattagctgggtgtggtggtgggcacctgcagtcccagctactcgggaggctgaggcaggagaatggcatgaacccaggaggcggactatgcagtgagccaagatcgtgccactgcactccagcctgggcaacagagcgagactccgcctacaaaaaaaaaaaaaaaaaaaaaaaaaacgcaaacctgactcttaaaaaattaaacataccctgcataactgaacagtgtccacaagcaggaatctctctggatggcaaggtggcagccgactatggcactcaccaaaaaggcaccttcccccatcatccatgcaaagacctttcccaaagccaccagacctccgttcaaacaactcaaatccggtctagaaattaaaaatccttgtactgaaagcaaaatcagggttagctgtgactaagatccaagaaataaactttttaaaaagtaataaacatgaattcatcagtatgaaaaaggtctgtgcacagtgagcagttggcacaccgatgcagtgcaccgagggccaaggcgaaggccgcagggggaggaggctcagcagagggaggacaccccagctgacaacgcacgcccactggtgccagtgctttggagaacatgccaggtcatgtctacgctttcctcactaaggatttaatttcagtattctacaatctaactctacactctcaaaacataattagaaacaatgttttgaatgtgatggagggatgcagtagagcttctctagaaaatgcttttgaatctgtctcagaaaaccacctgttttgtagagaccaagactcttcctccattttggctcaagctggatcctgagtaaaagacaatcccacaaacgcccctttatgcacagcttcccccacacgctgtttgtctctgtttctctctctctcaatacccctagattttaggtcaaaacaaacctgtttccaccagctggacagtatcattcaggaacggttttacgcatcaaagactcatttccagataaagctgaagctccagggaggaggcctgtgtcccacaaaggccaggtgctgacacggttagtcctttcctccccaccacccaccaggaatgttgctggaacccagacacgcacagcaaggttctgctgtttaccctgctccccggtggcaggaaggtgtgtgccctattctcactccaaccccatcacggcctggtgagcctccggcgctcctgccccttacagcacaagccggccaccacctcccacgggccctgacactgtcactcaacacctcaccacagcacccagcctctgcctctttcattagacataagcaaggatttttcctctagccaggaagtttttcaaatgtgaagtatttcatttttttcttcttatttttttgaaacagaatctcgctctgtcatccagactggagtgcaatggtgcaatcttggctcactgcgacctctgcctcccaggcccaagcaattctcctgcctcagcccccgtgtagctcggattacaggcatgcatcaccacgcccagctaatttttatattttcagtagagacagggtttcaccctgacctcaagtgatctgcccgccctggcctccaaagtgctgggattacaggtgtgagccacctcacccggcctcaaatgtgaagtatttcaaatcgaacttgttcacagtcaaggcaagcatggcatgcttgctttggccagcacatgtactaaaaattcgaacaacagagacgattaccatagcccctgtgcaatgatgacatgcaaatttgtgaagcattccatactttaaaaaaaacacacacagattgggacctgctctgcaaggcatcagatgccttccagtcagtaagagacaagagatacacagggtgctcccattcccacagcaagcaccaccctgcaccactagtattagcaccacccacatggaagggtgccagacacatacctactagctgcctgccacgcatggaaaattctttaggcaataccctccgcacccagaaggctaccagacctgttaagccttttcaaccagtttttgcaagcaagagaaatgcaattcttaagagcgggaacacccctttattacatgtaaagatacacaagctggatgaattgaataggggtgaacagtgatgacccatgaccaagatgcattaagaaacagatctgcacaggaaggtggaacaaggcccgtgagtgcagagcaagcctgctgggagggcaggggcttgtcttggaggaaagtgccaacaaagcctgtgccaactacagctgccgtgccgggccggcgtcaacaccgaaggagaggtgtgcagagacaaagcggcctgtcaggctgaacagggaggcagaaactccgcagaccaagaatacagtttccatagtaccctgtaactcaccaaggctgggacaaaggttaatgaaaagttcaaatctgaaataaataacaactcacttcggtattttacaaaaaaggtagttaagtattttttttgtgttcctgcataaaatactagtaagactcaaaacaggtagatactgatatgcaagttttaaaatcacaagcagaagaaacaacactctgtatgcccttccaggtggaaatgcagtcagcagaaaactgtctccatgagataaatgctcctgcccaaagcccactctagcaatgcttcctccctgaaccacaactctgaacaggctgccactcactgcaactccttgcacatgacagacttgctgggaagagcaggtgcgtactaaacattttctttgggctccagaaagcactaacggcctacttttgcaacggggcggtcgggggggtggagtggagggaggggggttgtgtagggtttgccatcagcgttaccctggagctagtccagccctggacttcgatatcacctgaaatccaatcatcaaactttgcccactgtttcttctccaaaagcaaggaaaagaaaagctatcatgagccccttcagggtctagcagcatacaagactgcttttagaaattctactccaggcatagtggctcacgcttgtaatcccagcactttggaaaacaggaaggaggatggcatgagcccatgagctcaagaccaggctggataacacagccagatcccgtctctgttataaataaataaataaaatgtaaaaaaaagagaaattctaccaaataaagatcaactatgatgtaacaaccaagtaaccctacagtgtgagaaatgcatgaggggcttaagctcagggaaccaccacctaaagagagaggcagagacctcagaggacatcaccacaggagcaggcaggctcccacccagacagtggcacactgccacccttgcaaacctaccacacagacccgttcagcacctgcccttgcaccacccacctggaggctcagcatccaggtgtgctggccccttgggtgagggtgcccaggcactcaccaactgaagtccccatctctccacggcaggcccacctcagaggaggcaaatgttaacggctgatttcttcccataaagctaagcccttatccatgtggcttgtttacaaaagtaaaacaggctgtttggacatggcattaaccaatgtattagtaagggaaggggagcaagctgttttctttaactaatatatataggtccaaccctagttcaaccactgctcagccgtttcgaaccactggctgagcaaattcagcctctctgaggttcaggtaaactaagaggtcatctccttggggcgtaagatgctacccctgaagcaacatcacacctctcatggacgtcactatcatcctccaccccaacctgcaaacatacctaggaccagtgccccagccccaaggagccacagaggctgaggatgatccgtcctccaaatgctcaggctactctgaagcaggaaacaaagacagcaataaccacaagcacagggacaatgtcctgcctgacacctgaattcttactctgatatctcaacatcctcttcaataaaatcaggaaataactgtatttttttaaaaaaacgattttgagcccgggcactgtggctcacgcctatagtcccagcactttgggaggctgaggcaggcagatcacctgaggtcaggagttcgagaccagcctgacccacatggagaaaccccgtctctactaaaaatacaaaattagccaggtggtgcatgcctgtaatcccagctactcaggaggctgaggcaggagaatcacttgaacccaagaggcagacattgtggtgagcggagatcgtgccattgcactctggcctgggcaacaagagcgaaactccgtctcaaaaacaaaaacaaaaaaaaaaattttttgttaaaaaaaaaaaaaaaaaaaccagcctagtatatgttcctgcctaagagaatatgaagctttgttttgttcttcagatggatccacacttagaaccaccatctttaaaaaaaaaaaactgtttaaaaaggacttccaattgcatttcatgaaggcagtgggtagaaaatccttgatcagtccctaattgggtgtgttttccatgaatgagctattgggatacagagtgtcgagaacaagaaaacagcttctaatatgaaaacagatgaggttctcctaaagcttctgtgacagctgcatctaaacagtttaacactgaggtggacgggcgcagtggctcacgcccctaatcccagcactttgggaggcccagacaggcagatcgcttgagccctggagttcgagaccagcctggtcaacatagcaaaaccccatctctacaaaaaacacaaaacttatccgggtgtggtggcaagcatctgtactcccagctgacagggaggctaagaaggaaaggtcacttaagctcaacaggcagaggtggcagtgagctgtgatcatgccactgcactccagcctgggtgacagagcgagcccccgtctcaaacaaaaacaaaaaccaaaaaaaacccacagactcaattctggctgccaggccatcaagggctgtgaagtgaagccctgagatccttgtggcaggaccctggacacacaatgacagtgccaccagccacagccatgcccagcaagcagcttcctgtccagtgagcaccaaggggcccttctcacacacagcctcccactcaaacctcgagcatccgcttctctcctcctccactctggggcacagaggctctcgccagcccccacagctgcttctccgcttgtcaccctgccacacaccctctgtccctgcagttccagggacagccgaggtgttctcactctgcaccaagtgcctcacgggccaggtcctgcttaaagcctgaatgaagcaaagcttggaaaggacccaacacaacctgccaccaactgaatgcctgccatccctccccaccctacgaagacactgcatgaaagccaccgagcacgtgactgcatgacccccacacaaagggcacgtccatcgttccaactacaaagctccacgtccaacaccagtggcctcctcacccccaatgcatatttgcaacccattagtaccaaaagtttaatcactattgctgccctgtctcctactaccccattccttgccctcattaaactcctaaagacagtggtccctagatgcctccctctcttccctatccagcgacttatcacaaacaccccaacaccctttcctctccatcagatatcactgaacctcaacaagggggcctgaggtgccaaagaaacatcacatagcacgatctagagtgtagcaaccacacagctaacacccaaatcagagggtcctcatgatcccatccatgcacccacatcccggctgtcgtccacaatcctacgaatcagagggtcctcgtgatccccatccgtgcactcacactccctgctgtggtccacaatcctacaacaatgctccactcttggcctcgtaccctaagtgtccacattccacctgttctcactcctcctacacagccacctttggccctaagaacactgcatccggacacgcaggccctcggcctcccaaagtgctgggattacaggcgtgagccaccgcgcctggcccaacatcatgtatttattacatgtaccagcatttatctaatattttcctaaaatacaataactttttctttttttttttttttttggagacaaagtctcactctgtcacccaagctggagtgcactggcacaatctcagctcactgcaacctccacttcccaggttcaagcaattgtcctgtctcagcctcccaggtagctgggactacaggcgcccaccaccacgcctggctcatttttgtatttttagtagagacagggtttcaccatattggtcaggctggtctccaactcctgacctcaggtgatccgcccaccttggcctcccaaagtgctgggattacaggcatggagagttgggccatctattctctcactgaagcagggatgactttgtcacatgcacccttgcagacactgggcaccttgcagacagtgggcaccctgcagacagtgggcaccttgcagacactgggcacaggaattcagtaagactgataggtgatgtttttagttagggagaatatatgtgcaaattatttccatgtaatataaaaagaaaaagtctcaactgtaaaatgagcataaacagtccaatggtgaaaccttttctcaaaaatctgaattgaaaggacaagttatattagtgctcaagaaaaacttctccctgatctgtcagaattcacaccatgagttccaaatcacacgaaagtactcaaagtcttggccaaagcaaacctactacagcacctaaacacaaatctccattttcttttttcttaaattagccttactactatattattaaaactctcaaaccaaaagttgaaactaaaaattgaagtattttataaaggacataagcacaaaaataccttccaaataatcttcaaatacgcctaattaaaagcaggcatttaattgcacaaatttaatgaatttaacatttaaaagtaaagttaaactgcttctgaggccttacagtaccctaaaatcattttcaaagtccaagacgagacggtgctggactagcagtcctagaaaaaccctcaccagcaccgccccgtccaccggagcgcacgtgagtcccggcatgcgggcagggcaggagagctctttctatccccacccacctctggctcactccatgagcacaagcaaagcagtgccccggacctggcatctgttcatgttttacttgcccatatcaccattgtatttagttcttggtagcagccatcaaccatcataaagcagcttcttttattctttgctacttcaaatcacacatgaaaaagaaaatgcaagaatagaaacacagaaatggaaatgggccaggtgtggtggctcacacctgtaatcccagcatgttgggaggctgaggccggaggattgcttgagcccaggaatttaagacctgcctaaccaacacagtgaaacccagtctctacaaaaaaaaaaaaaaaaagaaaaatttgcaggcatgaggaatgttggtgcatgcctgtagtcccaactacttggaggctgaggtgggaggatcactcgaggtggggtggtcgaggctacagtgagccgtgatcccaccactgcattccatcctgggtgacagaatgagaccctgtctcagaaaaaaagaaacacagacatggagagagaaggcagctatcatggggcaaatttaaaccaggatctctggaaatgcgttattttttttttaaattatacccacacaccccttccacattcttctatacttagaaagggggtgtgcaggccgggcgtggtggctcatgcctgtaatccgagcactttgggaggccgaggcaggcagatcacctgaggtcgagagttcgagaccagcctgaccaacatggagaaaccccgtctctactaaaaatacaaaattaccagggcgtggtggtacatgcctgtaatcccagctactcgggaggctgaggcaggagaatcacttgaacctgggaggtggaggttgcagtgagccgagattgtgtcactgcactccagcctgggcaacaaaagcgaaactccatctcaaaaaaaagaaaagtgtgcataccaacctggtgagctaggtaaggtgctcacatactggcaacagaaagcaggtgacatgatcaaagtcatagacaggcagagccacactgaagaatgcagtcctggctacaggtcccagctcctgcttcactgagcaccctgagggagcccttcctaagcaaggggagccctgcctaagcactggggagcactttatctcacaacaggaaaaggcattctttcccctcagtttctcagagacccagtgacttcaggatttgcaaacaattgtgttactgaatgtgtcacactctgctccagctgcagggaagaacctgagtgatgagagtacatgattctgactctgaccctgacttcctcttaacctccatacccaaatcaagacctgtgcatggagctggctcagaccggggagccagatgctgtctgaaaatatgccatcaattctttctactcacttaaaattcaagtacctaagacattcaccccccattttgtaaaaaagcaaacaaaaacataagactcagagacagaatgtaagaatacaacgaagtatacctggctggaagaacagcttttacagtgacagcaacaccctaatgggccctcaagacaaacttgtgcctccctccgacggtgtacaaggagttaggactttcctgtgaccctcaacaaatacttgcaagtataaagttcgttttaacttctagacccgctttgttttagtactgattgcagaagagggctgacaatcccaagctctaagcctttcttgtgattatcattcccaaattctctttcgctatgcatacattcctaaactcctactttctccaaattctcaaaacattctattttacagagagagacagggtctcactatggtgtccaggctggtctctaactcctcgcctcaagcaatcctcctaccccagcctccaaaactggcgggattacaggcgtgagccaccatgcctggcctgtcaagacattctaaattctattttgttcaatttaatatcacacagaaactaaatatgccttccatcagccatgaaaatgactaatgaaaatgtaaatgaccacgtggcccaatcctggtttccatgggaagaccagctggctcaccacccagctaagagttatggcctaaatcagaggtgatcggggtgatcagaggtgagcaaagcactgtttctgtaaagttttagttttattggaacacagccatacacagccatgcttttgcttcaatggcaaagttaagtagtttcaacagagaaacctatggctggcaaagttctttaccacttggtcctctgtagaaaaagtttgccaatgcctggcctatgtcagaattctaactacatctctacagactagcctaacaagtgggtcaagtgctaatagttttaagggtgtttcgggtttttgttttaaaagttaattatctgtaaagacaaatcaatggagacagatagtagattagtggctgcctggggtgtgaacagattaactgtgaattgacaggagggatcttactgaagtgccaaaaattttctaaaattggattatggtgatgatttcacaaattacttttttttttttttttttgagacgaagcctcactctgaggcccaggcaggagtgcagttgtgtgatctcagctcactgcagactccgcctcccgagttttcaagcaatcctcacacctcagcctcccaagtagctaagattactaaaggcacatgccatcaagactggttaatttttgtatttttagtagagacagaatttcgcagtgttggccaggctggtctcaaactcctgacctcaggtgatctgcaagcctcggcctcccaaagtgctgggattacaggctagagccaccgcacctggcccatttcacaaattacttttagtaagcaaacttaactaaaaatcactgaacggcatacttacaatgcatcaatttatgacggaaaaagtatttcagtgaatcttaaaaactgaaaaagaaaagtcaactatctgtataattgtactttggtaatctaagacctaaagtttagggtacaagctgaaataaaatcctaaaaaatctttaaaacatgtgtctagacgttcaaaatttaacctctggtatcaaatagctcatttgcgccgggtgcagtgtctcacgtctataatcccagaactttgggaggccgaggcaggtggatcacctgacctcaggagttcaagaccagcctggacaacacggtgaaaccccatctctactaaaatacaaaaattaaccaggcatggtggcacacgcctataatcccagctactcgggaggctgcagcaggagaatcgcttgaacctgggaggtggaggttgcagtaagccgagatcacaccactgcactccagcctgggcaacagagtgagactctgtctcaaaataaaacaaaaaaaactcatttgcaatttagagacaggaattacagccaagtgcaccccttaccccactcccctggagccacaagccaagagggcaaggtagggaggaccaaccatgcctggtgtcctgccaccaatggctccaggaaccccaagttctctcccacaccctgggcgtgattaaaactagtaacacctttctgttagaaaccacagcgggtgaggacacagctgtttactttttttttaatcaagaatgctgctctcagcactctgggaggctgaggcgggtggatcacctgaggtcaagagattgagaccagcctggccaacatggtgaaacctcatctctactaaaaatacaaaaattagccgagtgtggtggcgggagcctgtaatctcagctcaggaggctgaggcaggaggcaggaaaatctccagacctgggaggcagaggttgcagtgagcagagatcatgccattgcactccagcctaggcaacagagagagactctatctcaaaaaaaaaaaaaaaaaaaaaagaatactttgatggtatctttgaaagttaagaggtcctattcccctcactacttttagattcttgttttcacatggtcttcttgaaagaaactgcacacgcccgctttttcatacaatcacacatgcgtggataaacacataccatcttttattttattttctaaatagagacagggcctccttatgttgcccaggctggtgtcaaactcctgggctcaaacaatcctcctgactcggcctcccaaagtgctgggatgacagatgtaagccaccacgcccggctgcacagaacatctgaagcacatttcttttttgttgttgttgttgccgttttcataatagtatttaacaagataaatatcttggctcctttttgtttttattgccctgcccttcagggattaagtgcatttcttagatactcactacttctctgacattaaattttgtttcagttgcttacatcaacgtttcaaaacccagaaataagaaaattattgttcgaggtcaataaccatgtttataacaacttccaacttaaaatggaagaggaatcccttggagaacacacatttccttatggaagtttcctcaaaatttctaataggaatttcaactaagttaaagtactaatttaagtaggacaagacagaattctcttccttcccagacactattacaagccaaaccacgtttcacaggaacacgtcctgcctgctaaggtgtcccctaggacaaagctgcttgccagctgaccatcacttgtattgcatactttaaaaagtgtggctaacagaaaggaggcaagacagatgttatttaaataaaagcacaaagcatctgttcaagcacgaaaaaacatatgggaaaatacaagcacaggacactcaggacaatgtgatgtgctgaagacacagcggcaaacaaaagagaccggatgccactgacctgtccaagaagaagaacaggaagtattacatgaaggagaacaggaagtaaaacatgactggagacagaacttgtgaattcgaggcaggactctggagccagcctgcccagggtccagtgctggcgtccactcccaacttctaacttccctgggcaagtggcccaacttccttgtgcctcaactgacttatctctgccacaaggggcagaggagcacccgcacctcgggagttcccaagactgtctgagtggacctacatggagcacacagaagagcacccggcaggtagtacatgtttcacaataatccttccacaatgcaaatgacatacactctaaactcatcatgggggagtgcttcacaacaccccctggcacaccacagccaacacaaccacagccaacacaacgacagccgcgccacaaccaagagagcctgaagagctgctctcagtcactgcccagcaagtgtgggcagctgtagcttacagaccaaggccacagaccacaacttctgcaggcttgcctgggacacaggggcagataaggagagcacctgaggcctacgctgagtcccacagcaaggatccgacccacatgggcacagaagacttctactgcaggttgcaaatcttacatccttgacctagtgggtaaaaaaaccctaagaaaaggcaactttctaaaacaatcatactacactcatataagcaattaatttttaataagcactgctcatatattaatgccaattttctccttcacaaattataactctgtcttaaaccaagccactatgaaagcggctctaggccagactctcagcagctaccactgctacggttcctcaagctgctcccctgggtgcttccagggttcctcaagctgctcccctgggtgcttccagggttcctcaagctgctcccctgggtgcttccagggttcctcaagctgctcccctgggtgcttccagggttcctcaagctgctcccctgggtgcttctagggttcctcaagctgctcccctgggtgcttctagggttcctcaagctgctcccctgggtgcttccagggttcctcaagctgctcccctgggtgtttctagggttcctcaagctgctcccctgggtgcttctagggttcctcaagctgctcccctgggtgctgttagggttcctcaagctgctcccctgagtgtttctagggttcctcaagctgctcccctgggtgcttctagggttcctcaagctgctcccctgggtgctgttagggttcctcaagctgctcccctgggtgcttctagcgttcctcaagctgctcccctgggtgcttctagggttcctcaagctgctcccctgggtgcttctagggttcctcaagctgctcccctgggtgctgttagggttcctcaagctgctcccctgggtgcttctagcattcctcaagctgcttccctgggtgcttctagggttcctcaagctgctcccctgggtgctgttaggcttcctcaagctgctcccctgggtgcttctagcgttcctcaagctgcttccctgggtgcttctagggttcctcaagctgctcccatgggtgctgttagggttcctcatgctatctccccttaagtgctgtggcagcagtgcagagcccacatagctatataagctactcagtaagaaaaaccacacaggagctacacgcaccacatcatggacaaacctcaaaacacaccaggtggggatgtcactgaaaacagccccaaaactcactccttccaacactgcatgagtaagctgcaaaaactgtcagaatcaactcttcagaactgtggagtctaataaaaaacttctaacaagcagagaacgcctaatgaaaaagctgctcgatttgggcaggagagagctgtggagaggaacttacctgctcacacacctcatccttggagacagcagcccccattgctggtacaaaagagtgccgcagactcaattctcaaagaattggggctgtacattttgacctatctggtaggaatgtaaaatggtgcagctgttgttgaaatactttggcaattcctcaaaaggtaaacacagaactatgatataacacagcaattccactccttggtatatgcccaaaaagtgttcaaatggaaacctgtgcacacatgctcacagcactattgaaaacagaaaggtggaaacaggtagggcgtggtggctcacacctctaatcccagcacttttgagaggctgaagctggccaatcacctgaggtcaggagtttgagaccagcctggccaacatgctgaaatcctgtctctactgaaaaatacaaaaagtagtctggtgtggtggcgtgcacctgtagtcccagctacccgggaggctaaggcaggagaatcatttgaacccaggaggcggatgttgcagtgaaccgagattgtgccactatactccagcctgggcaacagaacaagattcggtcccaaaaaaaaaagggggggtggaaacgggggccaggcaagctggctcatgcctgtaatcccagcacttcgggagggcaagacaggcagaccacttgaggtcaggagttcgagaccagcctaaccaacatggaaaaaccctgtctctactaaaaatagaaaattagccgagcgtggtggcatgtgccagtaatgccagctactcgggaggctgaggcaggagaatcacttgaacccgggaggcggaggttgcagcaagccgagatcacgccactccaggctgggtgacagagcaagactccgtttcaaaaaaaaaaaaaaaagatggaaacaagccaagtgtcaatcaagacaggatgggtaaacaccctgcctacacccagacaatgcagcattattcacaagtaaacaggaatacagttccaagacatacaacatagatggactccaaaaacacgttatgtgaaagaagccggacactaaaggccatatattatatgaactcattcctaggaagtctccaaaatagacagatccacagtggcacagagtcaacagtggctgaagagctgcggagaagtggagcgcttccttcggggggaacagaaatatcctggaatagacataatggtgctagttgcacaaagttgtaaatgtgctacaggccatggaattgtacacattcaaatggtcagagtggtggggtgttcgttatgtgagtcttttttttttttttttttttgagacggagtctcgctctgtcgcccaggctggagtgcagtggcgcaatctcggctcactgcaagctccgcctcccgggttcacgccattctcctgcctcagcctcccaagtagctgggactacaggcgcccgccactacgcccggctaattttttgtatttttagtagagacggggtttcaccgttttagccgggatggtctcgatctcctgacctcgtgatccgcccgcctcggcctcccaaagtgctgggattacaggcgtgagccaccgcgcccggccgagtcttacctcaataaaattaaagtagtatgtcagactcaaaagactacaaattccaggccaggcgcagtggctcacgcctgtaatctcagcactttgggaggatgaggtgggcagatcatgcggtcaggagttcaagaccagcccagtcaatatggtaaaaccctgtctctacttgaaaatacaaaaattagccaggcgtggtggtgggcacccgtaatcccagctactcgggaggctagggcagaagaatcacttgaacccgggaggcggaggctgcagtgagctgagatcgcgccactgcactccagcaaggctccgtctcaagaaaaaaaaaaaaaaagactacaaattccattcatatgaaattctaaaataagcaaaactaatccacaataacagaaagtgggctggcagtgcttggggcagtggagggttctggttacaaatgggcattctgcggtgatggaaatgtctgtgtcaagctggtgcttaatacctggggtatcaaaactgtcaaactcatcctactgtaccttctaaaatggctgcttttattatataaagtatacaggtataaacatcactgaagaaatccaggtacatgtgaaacacacaagtgtggagctgaatggagccacgcgaaccaatacacaatcgtcagattcagacccagaccccagctgagacggcacctcgcaatgacttgctcccaaagaaagatgttctggccagagccctggagaccccacacctggggactggagaccgcagccatccacctgcaactctgttctcagacacctctgctgtgcggtggccccaggaaagcagtgacacaaaaagaaaaaaaaaagctttctgaaacggtgctttagaggtttaaccaaaataaaactcaaccaattttcttcaaaacataaactcctgttcttgttgtactttagcacttgctttacgtaatttcatttcttttttttttttgagacggaatctcactgtgtcacccaggttggagtgcagtggcgcgatctccgctcactgcaagctccgcctcccgggttcaggccattctcctgcctcagcctcctgagtagctgggactacaggcgcccgccaccacgcccggctaattttttgtatttttagtagagacggggtttcaccatgttagccaggatggtctcgatctcctgacctcgtgatccgcccatctcggcctcccaaagtgctgggattacaggcgtgagccaccgtgcccggccacgtaatttcatttcttaggaataacattttacattaaagaaaatactttgccacgctttcactcatgattttgcagttccactggaaggctgaacatcactctggcaagttcagacatgttccattaatcatctccaaggctgcttgctacaaagaagctgtttcattcaacagcatctccttaaacaaaatccaagcctgctttgcctttggtaaccaaaacttgatttaacctcccaaagagggagccagcctgctgctggccactgcgtgccctaggcctcagcttcctgctgctgactggctgcctgcatctcctctgcggccccggcctcatgaagctgcccactggtcctgtggttcctcaggggtcctggcactggcaaggggacgcagcaaacccacaccgtcgtgaccctggtcacatacacctgtcttcaggaaaacttctctgtgatgaaagaacccagattcacagtggtgaactcttcaaaaactatactaaacaagggaagactgtgctagatgaaataaccatacatgcatttattcacatgggaaatggatcagacaatggctgccaatgctaagaataaattcttgatgagtttctaagaaatcaagacaaccttcaaggttgggccaagagcatggatgggaaaggcagatgtgcatctggttctgttttctgaccataataatgagatctacatgaaaggatgtcttgagaggagggaacagtggtaagagtgaagccagcagagagagcttggaaaagagaattcagacccatcttcaagttaacaaaaacaattactgactcatacgaagaaatcgggaaagtcaataaaacggatgcttctaaacctgttgatgaagtttttctgaagttgtgaaaatttccaacaaaaaagactaactctaagcctgaaagtatcctttcctttctttttgagccacgacacccggcctcttacaagttttttatttccaaccttaagtgaatttgtggaccaaatttcaaaacaactttttgtgaattcagttcctgcataatatgtttggtaaacaactaaaaaactgattcctagtactgtttcagtatttatcaaacaactgatcgtgttctataaaaaggtttaaaaaaataaaattcaggaacagtggcccatgcttgtaatcccagcacactgggaagcctaggcaagaggatttcttgaggcgtctgagaccagccccatgtctacaaacaataaaaaagtagctgggcatggtggtcgtgcctgcagtcccagctattcaggaggctgagcctggaggatcgcttgagcccaggaagtcgagattgcagtgagccaatttcgtgtcactgcactccatcctgggtgaccaagcaagaccctgtatccaaaaaaaaagaaaaaaaaaaggccaggtgcggtggctcacacctgtaatcccagcactttgagaggctgaggtaggtggatcatttgaggtccggagtttgagaccagcctacccaacatggtgaaactccgtctctactaaaaatacaaaagaattagctgggcgtggtggtgtgcgcctgtaatcccagctactcgggaggctgaggcaggagaatcatttgaacctgggaggccgagattgcagtgagctgagattgcgccactgcactccagcctgggcaacagactaagacaccgtctcaaaaacaacaagaacaaaaaacattaaaaaataaaattaaaattaaaaaataaaaatcacatgctttggtcataaaaataataagtgtatcctataaatgtcctgaggtcaggagttcaagaccagcctggccaatatggcaaaaccccgtctccactaaaaatacaaaaaattagccgggcgtggtgccaggtgcctgtaatcccagctactcaggaggctgaagcaggaaaattgcttgaacttgggaggtgggggatgcagtgagccaagatagtgccattgcactccagccttggtgacagagcgagattctgtctcaaaaacaaaacaaaacaaaaattaaatttgacactgggcacagcagctcacgcatgtaatctcagcactatggaaggttgaagcaggcgggttgtttgagcccaggaggtcgaggctatagtgatccacgatcacaccactgcactccagcccgagcaagacagcaagactctgtctcaaaaataagtaaacaaaaattgaatttgacctgcagggggtagtcacaattgaggaatctgagctgtggggcaaactgttcaaatgaagattctgacccacaggaacaaactgatccaaaagggaaatatgccagtcacgaaaggacaaatattgtatgaccccccaccccttacaggagaggtgccttggacagtgacattcataagagaagaaaggacaaatatcgtatgacccccccccccaacaggagacgcaccttgagtggtgacattcataacagaagaaaggacaaatatcgtatgaccacccccccgcaggagacgcaccttgagtggtgacattcataagagaagaaaggacaaatatcgtatgaccccctcccataggagacgcaccttgagtggtgacattcataagagaagaaaggacaaatatcgtatgaccccccccccccccttataggagaggtgccttgagtggtgacattcataagagaaagcagattggtggtcaggggttatggggagagtcgaggttatggggagagggatgaagagttagtgttaatgggtagccggtgtcgtctgggaagaccaagttctggagagggatggtggtgatggctttgcaccgtgtgaatctaataccagagaactgcacactcaaaaatggtacaaatggtcaattttatactgctgggctcagggaatccttcccctcagcctcctgaggagctgggaccacaggcacctgccaccacgcctggctaacttttgtattttttgtagaaacagggtatcttcatttgcccaggctggtctcaaacgcctgtgctcacgttatctgcttccctcggcctccgaaagtgctgagactacaggcgtgagccaccacaccccacttaataattccattttaataccgatttactaaacaaggaaaagctcatagaattactaactatgccatcttatttaggctacctaaattctctgaacttcatcttctaaataaataagaagaaatgtatcttttaacactaataactatggtcattcccattaaaacattaagttttgaaaactagggttctcatttaagcctgtctcacagcagctcagctctcagaatgttcagaagactctgacactgccctctcccctcctctggcactcattttggaaacctgcagagcatctattgaaaaagcccatcccagcatcttcttaatcactggtatacttccgtctgtcacgagcttcatttaaaaaaagcgtcacgctccctctccctccccctctccctctccccctctccctctccctctctccctctccctctccccatggtctccctctccctctctttccacggtctccctctcatgctgagtcgaagctggactgtactgctgccatctcggctcactgcaacccccctgcctgattctcctgactcagcctgccgagtgcctgcgattgcaggctcacgccgccacgcctgactggttttggtggagacggggtttcgctgtgttggccaggccggtctccagcccctaaccgcaagtgatccgccagcctcggcctcccgaggtgccgggattgcagacggagtctcgttcactcagtgctcaatggtgcccaggctggagtgcagtggcatgatctcggctcgctacaacctccacctcccagccgcctgccttggcctcccaaagtgccgagactgcaacctctgcccggccgccaccccgtctgggaagtgaggagcgtctctgcctggccgcccatcatctgggatgtgaggagcccctctgcctggctgcccagtctggaaagtgaggagcgtctccgcccagccgccatcccacttaggaagtgaggagcacctcttcccggccgccatcacatctaggaagtgaggagcgtctctgcccggccgcccatcgtctgagatgtggggagcgcctctgccccgccgccccgtctgggatgtgaggagcacctctgcccggccaccccgtctgacaagtgagaagaccctctgcccggcaaccaccccgtctgagaagtgaggagcccctccgcccggcagccaccccgtctgggaagtgaggagcgtctccgcccagcagccgccccatccgggagggaggtgagggggtcagccccccgcccagctgccccgtccgggagggaggtggaggtggggggggtcagcccccccgccaggccagccgccccgtccgggagggaggtgggggggtcagccccccgccaggccagccgccccatccgggagggaggtgggggggtcagcccccccgcccggccagccgccccgcccgggaggtgaggggcgcctctgcccggccgcccctactgggaagtgaggagcccctctgcccggccaccaccccgtctgggaggtgtgcccaacagctcattgagaacgggccatgatgacagtggcggttttgtggaatagaaagcggggaaaggtggggaaaagattgagaaatcggatggttgccgtgtctgtgtagaaagaagtagacatgggagacttttcattttgttctgtactaagaaaacttctgccttgggatcctgttgatctgtgaccttgcccccaaccctgtgctctctgaaacatgtgctgtgtccactcagggttaaatggattaagggcggtgcaagatgtgctttgttaaacagacggttgaaggcagcatactcgttaagagtcatcaccactccctaatctcaagtacccagggacacaaacactgcggaaggccgcagggtcctctgcctaggaaaaccagagacctttgttcacttgtttatttgctgaccttccctccactattgtcctatgaccctgccaaatccccctctatgagaaacacccaagaattatcaataaaaaataaataaattaaaaaaaaaaaaagcctcacactggataagtgtttttcaataatttcaacgtagtattccacagcaaattgtctagttcacatttaattcaaaattaattccctacgttaccacacaagcaatagactgttaagtttaatgctcccatggctttctacttatgcaaaaaattaacttcttcaaaacacctatggtggaagttcttcctgttcagactgcaattctatttacaaaaaacaatagtactgtagtactattagaccacaacgctaacgccaggcacagtggttcacacctgtaatcccaacattttgggagggtgaggtgggcggatcacttgaggtcaggagttaaagaccagcctggccaacatggtgaaaccccgtctctactaaaaatacaaaaattaatcaggcatggtggcgggcgcctgtagtcccagctactcgggaggctgagacacgagaatcacttgaacctgggaggtggaggctgtagcgagcgaagatcgcaccactgcactccagcctgggtgacagaacgagactccatctcaaaagaaaaaaaaagatcacaatggtggaatctaaccctcttatctaaaatttcttaaagtaacaaacattttgaaaagaataaatctggcagagcgtggtggctcacgcctgtaatcccagcactttgggaggccgaggcaggcagatcacgaggtcaggagttcaagaccagccaggccaacatggtgaaacctcatctctactaaaaatacaaaaaattagctgggcgtggggtcagacacctgtaatcccagctactcaggaggctgaggcacgagaatcgcttgaacctgggaggtggaggctgtagtgagccaagatcgcaacactgcactccagcctgggcgacagagtgagactccatcttaaaaaaaaaaaaaaaagaaaagaaaagaaaaagaaaaaaagaaaagaataaatctgtaacagcactggaaaacagaagaatgacatgtcaatagttgaccagaattaagcacctaaattaacagaaagtaaatgaaatcagacaaataacttaagtttagagaaaacagagaccaaactctacagaaggaagaagccgcagagatcaaactctacagaaagtcaggaccactgcagaggaaaagcaagcttcaaggatgaaaaaccaataaagctacacagttccaagttcatctactatgattactatgatggggaaaccacctgggggtcaggggccgaatctggcccaatgtcttttttagacagtccacaggctaagaatgaggtttatatttatacctggttgaaaaagaaaataacattttgtggtaagtgaaaattatatgaaattctaatttcagtgttagtaatagttgtaactggaaaacagccaggctcgttttaagtgtggccccggttccttccatgatacaacagcagagctgaagagctgtcagagaacatgcggccacaaggtctaactggcccttgacagaaaaactgagatggagttaaaaagacaagtctgcatattaaaagagcttcaagatgctaaccaatataaaaaagtcacaatctaaaccctaaaaatagcaaaatgtcagactcccacatatcaacagaaaatcctacaagtttccacaaaatcctaaaaagcttaactaaaaaagaatcatgaattagactggcgttggacttctctcatctttacagcagaggccacgacagagaacaggggcagcacactcttgccgtgaagagcagacagtccatcgaggcctttctgtgccacaccgcccgcccgcacacatccgcggaaagcctgctttcagctgctcagcaggtgggaacacttgctcctccagcattccaccatgagacaaaggaaaaagtcgcttctgtgtgtccaccagcacacgactcccatgtactcctgcacgtcacgtggacgagctaaagaagactcctctgctccacagccaccatcacactttcttgtttttgttattttttgagacggagtcggagtctcgctctgtcgcccaggctggagtgcagtgacacgatctcagctaactgcaagctccacctcctgagttcacgccattctcctgcctcagcctcccgagtagctgggactgcaggcgcccgccaccatgcccggctaattttttgtatttttagtagagatggggtttcaccgtgttagccaggatggtcttgatctcctgacctcatgatctgcccgcctcggcctcccaaagtgctggaattacaggcgtgagccaccgcgcctggccaccatcacactttctaaaaggtcagggtgccaatcacaacagggaccagtaaaaggagattgtgtcataaactcaacaagctgcccagaaaaagatgctggcagaacctgctgcactggccgtgggctcaggcacaccaggtaaacaccagagcgcatgcagcccaccccctacaagcaacgagcccccacctgctgacagttcaattctctgaagaagaaatgatgatcttatttatctaaaacccaaaagacttaattctcatttatgggaaacattcacaataggcaaatccagagagatagaaaagagagtaccagttgtcagggaaagggggaagggggacaaggactgatgacacaggggaccgcatgaggatggaaacttgctggaatgtgacagtggtgatgggtgcacaatataatgaatatactaaaaatcactaaactgtgagctgtaaatggtaaattttgtattctgtgaaccagatctcgttcatttttcaaaagaaagtcatcacccaacggggtaaaattcctaatgcctggcatccaacaaaatcactaggcaaagaaggaaaaaatacaagcctcagaaaacgacgattagtgctcaaaaaaacacaaatacaaaccataatgaggttaaaagaaataaaccaacatagaattgaaacaggtgttaaaattagtagacaaagacattaaaagctgttgaactgtattccacatgttcgacatggaaaatataaaaaagacaactcggtagcagcaaacaaaagatgcaaagagccaagtgtgggcggcaggggccctcccgcaactcgggcatgttcgagagtttttagagctccatcttcagctcctgctcccttccctggaggtcagtggccggagatgaaagccctagccctctaataatcatctggtcttcctggtgaccacccctaccctgtcagttcattagcttaaactctggtgtgatctgaaaggagctagttatgaataacaaatgacatcctatcatataagaaattccaatggttgcaggaactctgtgccaggagtgagaaggcgcagggagaaaaagaccacataatcttttattgaccaaagttgccaaacccacaagctgcaatcaggccaggagcggcggctcatgtctataatcccagaacctggggaggccacagcaggtggatcgcttgagcccaggagtttgagatgggccagggcaacatggctaaaccccatctctacaaaaaaaaaaaacagaaagattagctggctgggtatggtggcacgcacctgtagtctcagctatttgagaggctgaggtgggaaaactgcctgagcccaggaagttgaggctgcagtgagctgtgatggcaacactgcactccagcctggaccacagagtaagaccttgtctctaaaaagaaaccctgggctcaagtggccatccagcctcagcctcccaagtagctgggactacaggcacatgctatcacacccagctaagttttatttttatttttgtagagacggggtcttgctatgctgcccaggctggtcttgagctcctggtctcaagtgatcccccgccttggcctctcaaagtgctgagactacaggcgttgcatctgaccctgtatcactcttcaacacgcaggatgcactgcacagctgatcccaaatgctgttgtgaatctaatcaagataccgtaagacatactgcatatgtttttaaaaatcagataagacgactgggtgacttgctacccacagtgttttgttttgtttgtttgttgagacaatgtctcgctctgttgcccgggctcaagtggagtggcgtgatctcagctcactgcaacctctgcctcccgggttcaagtgtttctcttgcctcagcctcccgagtagctgggactacagatgcgcaccaccatacccaggtaagtttttttgtatttttagtagagacggggtttggttatgttggccaggctggtcttgaactcctggcctcaagtgatctgcccacctcggcctcccaaagtgctgggattacaggtgtgagccaccacgcccagactgcagtctttatcactttatgacactgtaatcatgaacttggaaagaagggtctattaacttagtgttaacttgaaaaggaaaaccaaagcagaaatctaaacaattatttggatgactacagcaaaactaagaggatttgggtttaagttgttgtagtagctatgccacatggcacagactctatcaccttctcacccacacctgcaacgtgagtgcagctcctccaatcatgaggtcggggggaaagtctattttgcaccccttgaacccagtctcactcaccgatttgctgttaccaacagaatgaagcaaaagttggccaggtgcaatggctcacacttgtaatcccaggactttgggaggctgagacaggtggatcacttgaggccagaagtttaagactggcctggccaacatgtcgaaatcctgtctctactaaaaatacaaaaattagccgagcgcggtggcacaggcctgtaatgttagctactcaggaggctgaggctggagaattgcttgggaacctgggaggcagaggttgcagtgagccgagatcgcgccactgcactccagcctgggcaacagagtaagacgctatctcaaaaaaaaagaaggacgaagcaaaagtgaagccatgtggcccctgcttctgctgccctactgttcttggcagccccaatggccagcctgctggatgttgaaacgtacagggctcagctgacaccctgccagccaatgtatcctacaggaagaatgatacactgtcaccaagtgggtttaacccaggaatacatgattggttaaacgttcaaaaaacaaaaccaaatgataaataaatgtaaaagaaaactataaaattcaatgtccattcctgatacttagcaaacttgtaatagaagggaacttcctcaacctcataaagtgcctttatgaaatcccacagcaaacatcatggttaatggtgaaaaagtggacacttttcaattaccatcagaaataagcctgtgtcagagcctgcagtgagccaccactgcactgcacttcagcttgggccacagggcgaggctctgtttcaaaaaaaaaaagaggaaaaaaaagaaataagcctgtgatatccactcttttttttcttttgagatggagtctcactctgtcgcccaggctagagtgctgtagcgcaatcttggctcactgcaacctctgcctcccaggttcaagagattctccagcctctgcctcctgagcagctgggaatagaggcaaacactgccacgtccagctaatttttttgcatttcagtaaagatagggtttcactgtgttgcccaggatggtgtcaaactcctaacctcaggtgatccacccaccttggcctcccgaagtgctagaattacaggcgtgagccaccgcacctggttgatctccactcatcacttcttttgaacaccgtactggagattctagtccaagagaaaggagataaaacgtacgcaaataagaaaggaaaaagtaggccaggcgcggtggctcacacctgtaattccagcactttgggaggctgaggcgggcggatcacgaggtcaggagatggagaccatcctggctaacacggtgaaaccccgtctctactaaaaatgcaaaaaaaatagctgggcgtggtggcgggcgcctgtagtcccagctactcgggaggctgaggcaggagaatggcgtgaacccgggagcggcagttgcagggagccaagatcgcgcccggagacagagtgaggctccgtttcagaaaaacaaagtcagttgtactttttccttttcttttgtttttgacggagctcactctgtcgctcaggctggagcgcagtggtgcgatctcggctcattgcaacctccacttcccgggttcacgccactctcctacctcagcctctcgagtagctgggactacaggcgcccgccaccacgcccggctaatttttttgtatttttagtagagacggggtttcaccgtgttagccaggatggtctccgtgtcctgaacttgtgatctgcctgccccggcctcccaaagcgctgggattacaggcgtgagtcaccatgcctataatgtcaccggcctataatcccaattcttacaagaaaaccaaaagcgaggaaaaatgaagtaacttactcatggtcatagcttatcactaagattcaaaccctttctacaaatcctgccctgtagaaaaagcgctgaaatgggatgcactattaggacaggcacacaaggggaaacacacccctcagatgacagtgaggagcttatccaggtccaggtcaacgcaggtcagtctgaggagaggcagccatgggtgttttgtgtacagactaaacgtaggtagggaatactggttaacaccatagactgagaaaggagggtaaatactaaagtattagtctctaagaaatctcatgaaagcagccaggtgcgatggctcacgcctctaatcccagcactttgggaggcaaaggcaggtagatcacaaggtcaggagatcgagaccatcctggctaacatggcgaaacccagtctctactaaaaatacaaaaaattagccgggcgtggccgggcgcggtggctcatgcctgtaatcccagcactttggtagtaccaggcgggtggatcacaaggtcaggagatcaagactatcctggctaacacggtgaaaccccgtctctactaaaaaatacaaaaaaaaattagctgggcacggtggcggacatttgtagtcccagttactcgggaggctgaggcaggagagtggtgtgaacctgggaggcggagcttgcagtgagctgagatcatgccactgcactccagcctgggcgacagagcgagactctgtctcagaaaaaaaaggaaatctcatgaaagcatgggagccaaagccttccttcctacatcctcaatttaaaagcatgactgaggctgggcgcagtggctcactcctgtaatcccagcactctgggaggccaaggcaggaggatcatttgagctcagaagctggagatcagcctgacagcagagtgagaccccacctctgttttaaaagtaaaaaaaaataaataaataaaactaaagcactattgaccctccaaactagttactatctggaaattctagcgatttccaaatcacagctttcgaggaactgtgtgcaaaacctaaaagcctgctgccccgaagtcctgtgtggagtggtgctctcaccactcaggaattcacgagacggcaagaactcatcaagttaccctgcagccctgaaggagtccacaggaagtgattctctttgctagaggctgctctgagaaaaagcttcaggtaacaaattaggccaccatggagacacttaagatatgatttcatgaccaggtgtggtgcctcacgcctataatcccagcactctgggaggtagaggtgggcagatcacctgaggtcaggaccagcttggcccacatgatgaaacctcctctctactaaaaatacaaaaattatccgggcgtggtggcggacacctgtaatcccagctacttgggaggatgaggaaggagagttgcttgaactcaggaggcagaggttgcagtgagctgagatgatgccactgcactccagcctgggcgacagtgagactctgtctcaaaaaaaaaaaaaaaaaaaaaaaaaagatatgatttcatttaccacccaaatcaactcacatacaactcacagcaaagaggaaacaggaaaacatgtaccttaagtccttactcccccagttaccaggtcctgaacatcagggacaatggctatgaccctcgaggcatgcagccctgccaaacatcacatgctcattttatctccagacacatctcctagaataaaatgggaagctgttgtacccatccttgaccctcaggtgactacttttaaaggtgctctccaccgggcagaaagagcatcaggatcagggcagaaacctaattccgaccaagctttagggttccgagtctgagagcaacttcccatcctttttctgagactgaagctgctgtcaacactgcccaataaacactcgcaggacacagctaaggaagacagaaaagtgagaggcaaatggggatgctgactttgcatcttcatgttccaacctgagtatcacctgtgcttttgtgtttgtgtggatctgtagggacggtaccaagatctctaagtcaggtgcaatatcaggagatctgcacatttactaaggggaaggggaagggagaaaaaaaaccgtctcagactcaacaataaacctaggaatgaaaagatccaaagcaaaggagcagcaaggctggaaaagctccggcggcagagcaggacccgagtcaccagcacatcacactcctctgacccatttattgatttatttgagatgagctcttgctctgtcccccaggctggagggcagtggcacattcatgtgtcactgcaacatcaacctcccattccactgcgcccagcttattccattctaatggctgtgcacaccgtttaaatactgaccacagaggtgttactgttttattaggtatctgccctaagtgtgccaagccttttatttgaggatccaatgaatatcacttagtggaaaggaagtaaaagataattacaacacaacaataaattattaccacagaggggagcagagagcaccgcaagaccaaaggtgagaatctaaccaatggcagaagtcacaagtgaaaaaagagctcaaccatgagatcaagaggctcactgggggccagacatagtggctcatgtctgtgatcccagcactgtgggaggctgaggcaggaggatcacttgagcccagaagttgggagaccagcctgggcaacacagtgagaccccgactctacaaaaagtacaaacattagccaggtgtggtggtacacacctgtggtcccagctacccaggacagcttggcttgagcccaggaggtcaaggctgcaataagtcaggatcacaccactgccctccagccgaggcaagaaagcaagaccctgcctcaaaaaaaaaaaaggatcattgggaacatggaggcctgaaggatgagtaggcatcagtcagggaaaggagagaagggaatttgaggcaggaagcaaagacctcaagaactctgatgagtccatacttactactgaaaataaccaatctctgcctagagaatagaggtggagaaagaggcagactggactagagtagaattccaccaggccctgaccagctgcttcactgaccacatccatcatctcatctcacctcatcctcaccataagcctgagaggcaggcaggacagtgggaaatgcaaggcatagggcaaacagcctgatagtaccagggcaagcccaagtgtcccatccacccaaactgtggccacgagtcttgattctacttccgttctacaagtgggtccgggaatgcatgcaaatggaggagagagaagagacgcaccgctctcccacagactgatacgtcatggaggagagagagatgcaaccaattcccagagactgacatgtcagtatccagggaatgagggttctgaagaacaccccaggccagcagacagaccctaggtgagcctggcaatctccccacccagtgtccatgcctccttgtagccaccttgcccggagtgcaaggcgggtgggacctgtgacgtgcttctaacccacagaatgtggtgaaaacaatggaatggctttcccttgactgggttgcattaggtggcaaagttgctgcgctgtcactcccatgactacattatgttacgtaagacttagtctactgaagcagaagactctttgctgttttgaagtgagctgccaagctgcaaggggccatgcgccaagcaagtacagggggcctctaagagtcaagaggagacctcaagggacagtcaacaagaaaacaaagacttgcgtcccacaatcagcaagagataacttctgccacaacctgaaagagctcaaaagcacaccatcccccactcgagcctctgataagatcacagtcccacccaacacctagattgcaaccggatgaaaccctgagcagaggatcccactaagctgtgcccagacttccaacccacagaaactgtgagataataaatgtgttgtgtgtcaatttgttacacagcagtagaaaataaatacactggcctggcatggtgactcatgcctgtaatcccagcactatgggaggccaaggtggaaggaatgactgagcccaggaccttgagaccagcctgggcaacatggtgagaccctgtctctaccttatgtaaaaaaaaaaaaaaaaatttaagaccagaaatatacccccacacatcatcccatttgaaagaaaagctttcatccatgctacttccttccatgcacaaataatgactggttgccagaaaggcagcacaggtcactcttcagaactccaaatgctctttccaacctaccaccaacacacatgatgccaaccccactgagaccaaggcagcctcccaagctcagagagactccgagaccaagttcttcataactgaactcacagcttcaattatttcatactcaatcactatattccaagttttttataattaacaaaatgctgccttcaaggttacatatgccaccaacgtcaatcctcagaacactgcataacatcccaaaacttacacatgtatcatccaaataaaaaaataaaatgtaagttaaatcttcaaacgcaaatttgtgctgatgatctagaaggaaagctgggccctgcctggccgggagctgcctcctttcttccccagctttgtgcagggccacccctgccctctcctcacccctgctggtgcagtgagatgaggacctcaagtaagggggtggcagccgggacttccacaattcagggcaatctctggcatctgttgttcagtcagtaattttccaacagaccctcttgactgtgacgggcagagaaaggctggggagctcttgggtcgtcagtgggttggagagatggactaactcacaggtaggaaaaaaggcaatgaccactccactggagaacaaagcccacagcatttaagctggagggacaagaaaatccaatcattctgatgatgcagctcctgaggctccgtggccaagctgggatgtgaaagaagacaattccattcccctccctcatcaccaggtgactgctgcctcccagagagctccctcatgaaagccccgtaacccaccacgctgcactgtttctatagcaaccagaaagaaaatataaagcaagcagtttcacatgaaaattattctctattaaaatgaaatattgcagtcaggaaaagaattttgataaagaactaggtagaagacatcggtaacattaatgctaattatttattcactacccacacaaaagataatttttcctaaaattttaagataatcttttatcgttcacactggaagtctgaaaacagtactacagcaagtcaacaacaaacaattacaatcaaaattctgttctatgctgtgatatctccacgaaacacaaaatgctctcccaagtttaaagagggataaggaacacgaaaacaactgaccccggccaggtgcgggggctcacacctggaatcccagcattttgggaagccaaggtgggtggatcaattgaggtgaggagttcaagaccagcctggccaacatggtgaaaccctgtctctactaaaaaaatttaaaaattaaccaggcgtggtggtgggcacctgtagtcccagctacttgggaggctgaggcagatgaagtgcttgaaaccgggaggtggaggttgcagggagccaagatcacgccactgcactccagcctgagtgatagagcgagactgtgtctcaaaaaaaaaaaaaaagaaaaagaaaacaactgagccaaacaatggagaaaacacagaaaatatgcaaattatgagaacaaaaaaaattcagccaatgccttctcacatcaaaataccaaaactacaaagccaatttcaggtataccaacccattctcaaaagatgaaatcaaattcaaatgaacctatctttgcctatctttgacatccctaaagccacctgtgacttgtcacagccttaataacccaccacaatcgggatggtcatatgtcccctgaagtcacagaaacagaactctcaactagcagactgttaacgtgtcctattatcctcaggttcttgggttattcgtagaatagcaaagcaaactacctgctttgtaacgatatcatttacacatcaacatcaggaataaatacaaaccaaaacctggccaaaccaggagaggtgcctggaccaggacaggcagacccaacgcctacgcttgcttctaaccagcctgggcaggtgggcaggttacaacacactcctgactcagccaggtggggctctgcagcctggcagttacagacactgagacctcaagccgcaggcactagcctgccaaaaaagacttctcctccttggtctcacagccaacagtttggacacatatcctagaggtatactacacttccagcaaagagatgggggcccaaggcccaccccaaaccacttcatcctcccctcaccacactctgaatctggttctctcagaggcatgatgagagctggggtggagaggtgtggaaaagacacagtcctgacttcagagtccctctgggcagactcatctcacagtatcgcgtaacacacaacacacgtttatacacgggcacagactggaacacatgatatggtaacaatctataatacgaggagctcgttaagctcagagatgaaaggggaagtgagtggaagaccacaccgtgagcatctattaataaaagcagacggagtaagaaacagagaaaaaggttctcctttggtcttgtctttctttgtctactatttaaaacacgagagaattagctagttaaatttatatctcagaaaacaggcacaatagaagtataaaagccatcacctttaagtcatttcccctttttttttttttttggagacagagtctcactctggtgcccaagctggagtgcagtggcgccatctcggctcactgcaacctccacctcccatgttcaagcgattctcctgcctcagcctcctcagtagctgggatgacaggcatgggccaccacgcgtaatttcttttttttctctctgagatggcgtctcactctgtcacccaggctggagtgcagtggtgcgattctggctcactgcaacctccacctcctgggttcaaccgattctcctgcctcaccctcccgagtagctgagattacaggcgcctgccaccacgcccagctaattttttgtatttttagaagagacagggtttcaccatgtggcccaggctggtcgcgaactcctgacctcaggtgatccacccgcttcagcctcccaaagtgctgggattacaggtgtgagccactgggcccggcagtatttagcattttaataataaaaatattggagaggccgggcgcggtggctcatgcctgtaatcccagcactttgggaggctgagcaggtacatcacctgaggtcaggagttcaagaccagcctggccaacatggtgaaaccccaactctactaaaaattcaaaaatcagccaggtgtggtggcaggcaggagaactgcttgaatgcaggagaactgcttgaacgcaggaggcgaaggtttcagtgagccaagatcacgccactgcactccagtctggggacagagcaagactccatctcaaaaataataacaaaaaattaaaaaatcagacctaatatttgtttcttggtatgtattctttctattccaatttattatggcttcaaaagaagcccaaaaaatcaaaaaagaaaaataaaacaatggcttaatgagaggagcgcttaataaactgaaattttgtttaacactttcaggaacagttcccaacgttgttgtcagggcacagtgacagtggcccagctgcctcgccagcagcacacacaggcctctggggccagcagagaaacactcccagtgccttcaagaaccccattttcacatccagggtccaggaaacagacatgcacgtcggactatcaccctagtgagaaagaaggaaagccacattggggttggttttttttttaacgtccttcaaatctatggaagacatcctcttctacacaactcataggaaaaaagatccctctgaggttaagcaacccgacgcctccacaccacaactgaacatcctcctacagcccccacccggtaactcattactttccaaagagaatgggtctcaaggtctcaaggacccactgccctccaaaaaagcaacctggacatcctgctgacaactgagcatcatacaaatgtgtccctttcgtccccgctgccctccaacagtcaccccccagagcgaagctgcctgtacaggccacgtcctctcctccagcagccggctacgcgcagctctccggcacagccatcacctgcaccactaaagcgggtggcagtttctgcccgtgacatttctcattaggactttccacaattcttgaggcttaatgcaaattccttattcccatgactaacatcaaagaaccacacctccaaagactgacactgggattattcctaaatttctcaaggatgaggtaatctggaggttaaacatgcctgaactgagctgtcctcacttgggccctccagacctttcacttgttgggtgtgtaaataatgacccaacactttttcttttcttttttgagatgttctcactctgtcaccggggctagagaccagtggcatgatctcagctcactgcaacctcaaccttcgggcctcaagacccacacctttggcagctgtgtaactagtgggtcctcctgttcctgtggacagcagtcccatcaacagcaagtcacgccaccacctaccccacaacccaacccagtccctgaagattcaggtgacagttaactgacgtcaagagagtgcaacatcactagaaaaacattaatgacggccagacgcagtggcgagactccactcaaacaaaaacaaaaaaaggaaaaaaaaaacactaattacaaggaaagtttgcctcctagataaaacacatgtgacctgatataaaaaatatctaggcctggcgcagtggctcacacctgcaatcccagcacttaaggaggccgaggcaggcggatcatctgaggtcgggagtttgagaccagcctgaccaacacggagaaaccccatgtctactaaaaatacaaaaaaattagctgggcttggtagcacatgcctgtaatcccagctattctggaggctgaggcaagagaatcatttgaacccaggaggcggaggttgcagtgagctgagatcacaccactgcactccagcctgggcaacagagcgaaactccgcccccaaaaaaaattaaattaaattttaaaaaggccagacgcagtggctcacacctgtaatcccagcactttgggaggccgagggggcggatcacgagttcaggagattgagaccatcctggctaacacggtgagaccccatctccactaaaaatacaaaaaattagccgggggtggtggcaggtgcctgtagtcccaaccactcgggaggctgaggcaggagaatggcatgaacctgggagtcggagcttgcagtgagccgagattgtgccactgcactccagcctgggtgacagagcgagactccatctcaaaaaaaaaaaaaaaaaaactagccgggcgtgatggcacacacctctaatcccagctactcgggaggctgaggcaggagaaatgcttgaacccgagaggcagaggttgcagtgagctgagatcgtgtcattgcactccagcctgggcaacagagcaagactcagtctcaaaaaaaaaaaattaagtctttcctgccaagtattattgccttccttctcagaccacaagcctttttaaaaatcctaacttttaggccaggcgtgatggctgacgcctgtaatcccagcactttgagaggccaaggcgggtggatcacaaggtcaggagattgagaccattctggctaacatggcgaaaccctgactctattaaaaatacaaaaaaattagccgagcctggtggtgggtgcctgtagtcccagctactcgggaggctgaggcaggagaatcgcgtgaacccaggaggcggaggttgcagtgagccgagatcacaccactgcactccagcctgggcgacagagtgagactccatctcaaaaaaaaagaaaaaaaaaatcctaacttttaagatttccaaccaaatattaattaggtatctattaatatgtgcatagaagtaacagaagatataaaacaaaaacaagtccaagatgagcctaaccatgtatttgggcaaacagaatccccgttcttctttctatactccttctagcagcaggcttcaacctccaaaatctctaacccccttctgtttggacccaaaaccactatcttggcccacattttacactgtcctgacaaaatatctgagggcaaataccagtctgccttggccattaaagtcatttaggcaacacatctgccgagctgagcagagccagcaggtacccatctaacacaaggctccgtcctgggctgtgcccctcaagaattccccagatagccatttcctttcctcaactgagatgcccacttctccctccagaatgtgggcaaatcacaccagtgacgtccacatctgtcaaatgtccccagggcagagaatggagagtgacacacagtaggcacaaaataaacagcacccagcttctgccccaccaccccgttccccattcctgctttcttttctgtctcctttgctctatcgtttcacaaagccactctcctaactaatgtttgccccattccctccactgggaatcaattcatcttctctttttccaagtctttttaatgaataccagttaacaccatgaagtcttcacaattcacctacacagtgtgctttcgagtccccttccctatttcaagtttctccaggttctcttgtagggatcttcttaaggctgcatgtgatgtcttgtgcctgtcatcccagcactttgggaggctgaggcaggaggactacttgaggccaggagttcaacatcagcctaagaaacatagcgaaaccccatttctacaaagaatttttaaaaattagcgcacgtctgtagttctagccactcatgacgttgacgcaggaggctcacttgagcccagaagctcaaggatgcagtgagatatggtcacgccactgcactccaccctgagtgacagagcaagaccttgtctcaaaaaaagaaccatttaggcaccatggtgttgcaaagccagtgctttcatctaggcatccaccgcctgcaaactctgacacatcatcttctgcctcaaaacaagtaagcaaatgaaattcaggtctatcattgcaaaccctacacaacccaactccagtcatgcttccaggttaatctgctgtcatcttccatcttcttggatgggctttcgtgttcagacacgtctggctgacattctcacgttacatgcggccttcccagcctttgtccccagccttcccgaagtcgaagatgcccttactctgatttctgcagtgacattctactgattctttttttaaaacagaaacatagcttacagttaaaaaaaaaaaaaatagcacttcttcccttaaatctcccaggtcacagagcctttccctcctctgatctatgatctctcttttcataagaaccaatatttaatgcaagctttagtcaactaaatgcatctttctcccagatctcagaacaggaggccacagcactgcacccagtgagcagccaatgaacatctgtgaaggaaatcagtgaaacatcagaaaaagcagagtttgtctagtttcagaagtcccttctataaaacatgtagctccttccagctaaaagaagacacaaagctgttctcccactgtagagcacactgcaccccatttggaaaagcagtcaggtgagccacacgtcagccacaccgtgctttacaaacatgccaatgtgtgaacggtcagtcacaaagacataaaaaaagatgactgccctcatcaaaactgccaaggtcatgaaaaacagggaaacgctgagaaatggttgcagacgagattaaggagacatgacaactaaatgcaatgtgggatcccggatggcatctgaggacagcaagggaacattactggaaaaacctccagcttgctcacccctggaacctgtgaatgccttaggttacgtggaaaagggaactgaggttactaatcagcagagagggagatgacctcgcagtgctcgggtgggcccaatttgtaaccacaaggatccaaaagtgaaacaagggccaggcacagtggctccatgcctgtaattccagcactgctggggggctgaggcgggaggattgattgagcccaggaggtcgacgctgcagtgagccttgattgtgccactgcactccagcctgggcaacagagccgagactctccaaaaaagcgggtgggcagcaggagtcagagagatgccatgaggctggctttgaagactgaggaaagcactacaggccgaatgcaggcagcctctggaacacggaaaagacaagaacacagattctcccctggagcctccagaaggaaccagccctacctacccagattttagcccaggcagatcatgttaggcttctaatcaacagaactataaaacaataaatctaaggttatggtggttagttacagcagcgctggaaaaccaacacgggcagcactgacacaagtcccagcacttctccaacgcccaagagctgttctctgtctcccttccacaccctccatttgccttcactcatccccctgaaccaatatatttatgggcttagaagaaagctattaaggaaaaggcacagattaagttctaagacagattttctcctcaactctctaaaacttcaccgtaccattagcttctactaaatgtccttttttacaagagtcagtttcaacatcatcttcttttaaaagccagtcatctggtgagaacccaagtttagcagaatcagatctaaagactttgccaaagaaaaatcaagcatgaatgtaaatctcattgaatatgcttaacattttacctgaactgtaagtgcaagcgtgcatcacttttctgagtttcacactaaaagataaaggatacaattcaaagatacctctcgcatgtgtcaggggaaaaatgcctgtgagaaaatgtttaggccgggcatggtggctcacgcctgtaatcccagccctttgggaggccaaggcaggcagatcacctgaggtcgggagtttgagaccagcctgaccaacacggagaaaccccgtctctacgaaaaatacaaaattagccaggagtggtggcgcgtgcctgtaatcccagctactcgggaagatgaggtaggagaatcgcctgaacccgggaggcggaggttgcggtgagccaagatcatgcctgggcaacaagagggaaactccatctcaaaaaaaaaaaaaaagaaagaaaatgttttgagtgttagcatatttaatatattaagctctaaagaacttcaaatttcagatagactattctcaaagtaacaaaaatatctatgtatgtaatttaaataaattaggagccaaacatacaattatagtgaagaaaaaatccacaaagtctaaaaattccttgaaatccgaatcaactgtggggctgtggaatactaacactacaagctctcgagacgctcttcggctgcctgaaagctggatttcttctttgtcaccatcagaaaaggcaaaggttattcagtgctctgcacatcctttaatcagccagacatcttagtcaaaatcatttttaaaaacttaatcctttcaagagtggtgctctggggtttttttggttttttacttttatttcctgttttgcaagatgtaaaaccacatctagaaacatggtggatactaacaaagcttgatttcttaagagaaaaataaggtccttcactgcgtcttaccttctctattttagataagtttaaacagtacagccataatgatttcaagtttacatcatcatccagaattaaaccaaagtcttctttgattgtgtcagatatgaatgcagcagtaagctaatcctaactctagtaaaacctcaggaaccaagcagcctacgcaatcttccctttacttggaaatactgcattccaaaatttattctaagccattagcatcctaagtctgaaaagagccatagggagtcgaggaagggcaacttactatcaatgcaccaagaaaagaggtttatttgctaattttacataaaaaataacctctgatatcataaagttattaggcatttacaaataacatttcaatttcagccattcttaaaagtcacattttttagagttaagtaatgaaggggaaagtcttctgaattttaccatgacaaaagaaattttcatatggtataaaaatggtttgttgagaaaaagccaacattttcaaataatgaacaggtacacattggttgctttacacgtggaaaaaagagccctacagatttccaggataataaataattcactgcacagatgcgaaggacaggcctggaaacaggtctcaccctccaccagccacaaggacgctgtaactgagacagcagcaccctgacagctgtctcaaccttgacctccaagaggaagagagaaagcgggtgtggggaagcccagaagactggattttcactcaacaggattcggtcctctaggcccctgaaaaatctcagccatacagacaggacggcttacttttattttcacactgaaaaccctcttaaccctttattcacagagccagctttagcactgtggggtttctggctaggcgcggtagttcacacctgtaatcccagcactttgggaggccaagacggctggatcacctgaggtcaggggttccagaccagcctgaccaacatggggaaaccccatctctactttaaaaaaaaaaaaaaaaaaacactaactgggagtggtggtatgggcctgtagtcccagctactcgggaggctgaggcagaagaatcacttgaatccgggaggcagaggttgctatgacccaagatcgtgccactgcactccagcctaggtgacagagactctgtctcaaaacaaaacaaaactgtgaggtttcttagagctagaatagtatctgaatgttttcaaccacaatcaaccagttcccctccaccaaataccctagccccttactgtaaacccaaaaatctaaaacaagtcgcaatctcccaaatatacccacaattagtctttaaaaagcaaacttttgccaattacataacagtttcatttacaaagaaactttgaaaacctaaacatacagaaaaaaatcaatagggcacacctccatttcgttgtctttccctccaaagagatcattttttcttcattaaaatgctaaaactttcatatcactccacctgctcagctacatgtgaccagaggggcctccggacaaacgagacacttaatcctcataagcagcagcagcaaaccacacttagtccagactgatttcaacccatcctttacagtcactgagaccttgatggaaacgatgaggaaatctgaataaaaactgcttctggcccttctactctggcctgaaaacagcagtcctgctaaaagtgctttcacagaaagcactttcttcccacaaagacaactctccctttatgtttctttatctcttgttctgccttaattgtgaaaactgtcttcccacctttatctaagttataaaagcaaacttgtaatgaaaacaaaagggggctgagcacagtggctcatgcctataatcccaacactttaggagactgaggtaagccaaccccagaaggctgaggcctacacaacacaggaagaccctgtttctacaaaaagtaaaataaattagctgggcacggcggcacatgcctgtggtcccagctactcaggagtctgaggtgggaggatcgcttcagctcagggagtcgagactgaagagagccacgttcacgcaactggccgctgccctccagcctgagcaacacaccgagaccctgcctcaaaaaaaaaaaaaaaagacttactaaaggaagtgatattacactaagacgcaaaggctgagtaggagttatcttggagtttggggggatctgcatgagatggcagcgaggtatgtcgaggccatgccacaaactatggcacatggcccaactgaggaaaggcaaggccaacgcagccagaatgactggaagcttggggcagggtcaagaatggggcatggtatcagagttaggccacagtcaccatttgggacgttatcataaaaataacatttgaggccaggcatggtggctcacgtctataatcccagcactttgggaggccgaggcaggtggatcacttgaggtcaggagtttgaaaccagcctggccaacatggtgaaactccagtctctactaacaataaaaaaaaattagccgtgtttggtaggaggtgtctgtaatcccagctacttgggaggctgaggcaggagaattgcttaaacccaggaggtggaggttgcagtgagtcgagatcatgccactgcactccagcctgggcaacaaagcgagactccgtctcaaaaaaaaaaaaaagaaaaaaacaatttcaaattaagagaacacacactgaaaacatttcaaaatttcaagacaataacttttatttgaattcattccatttttctataaagtttatcaaacgggccacactgaattcccacagagcactgactacacaagagtcacaaactgacgcagccaccagacaagggatgcaccatcattttcaccgattaactacaaataccttgctattaagagacactcacccattacacttacgatttgaggatgaagggagttacacagagtaatggacagatcaaaacacttattttggcaacaaaatgcagattattttctgagccagcatttactgatactctctaattatgttatttaattgatgatgggctctctgcccatatgcaaaataagactcctcttatatttgatgaagcataacctttctatgtcaaatctacttaaaaaggcacaaaaagaggccgggcgcggtggctcacgcctgtaatcccagcactttgggaggccaaggcaggtggatcacaaggttaggagttcaagaccagcgtggccaacatggtgaaaccccatctctactaaaaatacaaaaattagccaggcgtggcggtgggcgcctgtaatcccagctactcgggaggctgaggcagagaactgcttgaaccccaggagacggaggttgcaatgagccaagattgcgccactgcactccagcctgggcgacagagcgagactccaaaaaaataaaaataaaataaaataaaaaggggcacaaaaacttcttggaaaaatactgtccaacacaaacagcatagtttccttcactctatttgtagggagttctacttgccaccgtatcaacactgtaattaccgctaacatggcagccgctcgtcatcaacagcccatctgggagggtgtgatggcactgctggtatggggtgcccagcatggccagtccggagaaaagcatctggcggtggcaatgcaagtcagaaggctgacgcaaatgagagctgcaaaagaggaactcaggttttaaaggtgacacctttaaaaacaaaattctggtaaattgtgttatgtatattttactacagcaaaaatagaacagaagaaaaaaactgctgaaagtttcaagtttaggtcaaatttagcactatcttgtggggaacttttcaacaaacttaagaggcatcacgaagaacagagaaaacgtcacagcaacttggtctttgttccctcccatccagttccattcagatggccagcctatcgaaggagatcctgctcttcggggagaaactacagaaagaggagaacaacagctgaatggagggtaggggaggccacaccaactatacgagatccaatgcaagggtcacaatgaaggctgagcaagacatccgcccccccccctttttttctagtttaactacagttgcagagtaaaatcagaggacttctgtaatcattctctaacagaactcgaagtcttccagggcagccaatacttactaagagaaatcaaggtctcagagaaaccaaagaaacagcctcagggtctccgattttgaacgttatgccatagactaggtctgcacacaacaaaaacagtaactgtttcgatggcactttttccacaggtaatatcatcttatatgtttggctaagtctcaacatcccaaaaaggatcaaaagattctctaagttttgcagttcaacaactgtgcacacttttatttctcatttcaagtgttaaggatattgctctaatgactgcataaaactctctcctcatgtaagaaagcctgaaatctaatttctctaccataaaaccctgttcttgcaaaaggatacaaaactactcataatctacaaaaacgatgaatcctaagcatgttacatagaaggaaaacagtttcaaagcatagggagctgttagaccagcttcatcttcccaagcctcttccaaaacttcttggaagctgatatataacactaaccttccaaaaacacaacagaagcagaaaatcttaatggggcaccaggaaaagagcaagcctcgagaaaaatcaagactccccccgaccaaccttcccaaataacacaaacacaagagttaacagtacaatccctctttgagaggggactgaatcaatgtggcagggccaaccctacacacacacacacacgcgcgcgcgcgcgcgcgcgcacacacatacaccacacacacagctaccgccctgccaggggatgatgaaatgaggaacggaaattaacatttcaggcaacgtctcacattgttccttgaggccaagggctgctgttgcagccgccaccgccaccgctttcctcccagccaccccccacacccgcccgcctaccctccccctaacaccccccacacggctgcccgcattcctgcccctcctcggcctacgcgcgcctcctgcaaccccgacgcccccaggtccccagttcgccctccccctccggctcggagcccgagagccgcctgctctcatttcaaaacagcgataataatagggacgctgagaataacaactacgaccagcacggcgaaggcgcccctctcgcgggtcagaggtcggcgccccagctccgcagaacccggcgcccggccagcgccccctggcagcccctcccggcagcctcaggtccccaagacctgcaggcccgccccgaagccccccgtccgcccctcacggccgctccgagcccccgaggcccgccccggagccccctgtccgcctctcacggccgccccgggcccccacggcccccaggcccgccccggagcccccaatcggcccctcagagccgccgcgggcccccggccacccaggcccgcccggagcccccgtccgccccttacggccgacccaagctccgccgacctcccaggccccccccggagccccctatgggcccctcacggccaccccgggcccccaaagacccccggctgccccgaacccggacccgtaggcccgctccgggacccattattggtccctcacgatcgccccgggcccccaaagacccccgcccacccggccccgaccccccaggcccgcccggaggcccgcggcgcagctccgtcgccggggaaggcctgcaggccgcaaggccgcgcgaatgccccgtgcccgccccgaccaccgcccccagaccagcggcgcctctcaccgtgctccgagggctgcgcggctccgcgacggctcagcggcggggcgcgggcgctgcccatgcagcccgcggccgcgtttcccgggccgcgcggcccgagcggcaaggcggcggcggcggcggcgcgggctcgggcccggcagagctgcgagggacggcgggaggcgagcccgcccctcgggcgcgcccacggctcgggcgagagccgcggctcccggtgcggacgctactgatggggcgtctggccgcgggctcggcggcggcgcctccccggctggggccctcggtccatcgcgcaccgtctcagggcggcctctggctccaggacccagcggcggctgcggcgggagccggccgcatgagacgctcccgcccattggcccgccgtatccgccaccgccattggcccgccccggccggccgcaggggctgtgcacgtcacagcgccgtgagttagtgcgctaatggagtgaaggagagaggcgggattgacagcctctctggcggtccggaggcgggactaggaggacgtcccggtaacgattgggcagggtcctgcgtaagggcgcatgcgacactggaagtagcgagcaactggattggctgcctccgtcgcaaaggagggtgggtcttgcattctcgggcctgacgattggtctttccaagtgccggaagcaacagggatgtcgtctggaaacaaaatctggtattgaagcgcagggagacaaaacgtccacctctagagccgaggcggcggttgcctgtcgcgtgcccgtggtcttctgcctgcccccggacatctcgggccacgtccggcccggcctccggccgcgctgccctaacgggcgtcacggggcatgaagagctctgggcggctgcgaggggagggtaccggggcagcggggcggtcgctcggggctcccgcgcggtgactcttgctctgccgtcgaagagaacggccctcgggcgcgtcgcggccgcggctccagagcccctgggcctcgcgctctgagagcctgagccgcttgaggaggccaagcgcccacgaaccgcattccctgccttgctagttagttctccaacacgcgaaaaaggtagacgaggactggttttctttgcagctaaaatgaatcaagcctctggtaagtgtggatcctgttctaagtgcacctgtgttctcctccagaactaaaccaaaaagcaaggtgaacaaaatcggtgctccttcagtttcttctttagttctgcatgttactggggactaagacaacgggtaagcaaactatttataggcctcaatttacgaaataacggaattgcaaagtccggagtggataggaccgtgaggacggtcttttttcttgggcaacacgcattatggtcgagagatcagttgttaaaccgcccctgttcaaatcccagccctaccagtgactagcggtcaccctgtaggctttgtctctcagatcttcagtttcttggtgggtaaaatgggaactacaagtagcacctattcttttttttttttttttttgagtcagggtctcactctgtcgcccatgctggagtgcagtgctaactgcagcctcagcttcccgggctcagaggatcctcccaccttagcctactaagtaggtgggaccacagtcaggcatcaccacacccggctaattttttaaattttcgtagagataggctctctgtgtgtttcccaggctggtcttgaaatcctggactcaagcgaccctccctcctcagcttcccaaagtgctgggattagaggcatgagccacggtgcgggccaggagcacctattt

SEQ ID NO: 28 - DNA, 96493 bp, Homo sapiens
  source 1..96493: mol_type = genomic DNA
agcaggccctttggctcctgctggagacactggaagaccaggcgaccaggacagcgggtcgggccagtgcggtgtgacacgagggctcgagcggcttcgcagtttaaacgtgtcctcatcctacacctcccacggctgtttcggattcggtgccctcgtgcccctcagcttgcccagcggcacgtgggcctcaagcctggtccccagcggctgcgccagcctagctgtgttcaccttggggccgcgagggcctcccaccggctggcagctggtggacacgctgtcaagatcgggggaaaaaaaggaaggaaggaggctagggggacacagggctggtggcctccgcagtctttgacctgcgacgggcgcgagcgcacctccgcgcctttgcgcagagaccttcccccaagattggctcacgacgcctcctaccccgaagtcaagggctccctgtggcaaatcctcacacgccctcctcctccccgcccatccccggcgccaggactgacggggagagggcaaggccgggccagaggggctgtgggcctggactgcggctgtcgcccgcggccctgctcttttgggcagccagacgtggggtcagcgcccagtcgcagcctccgggggtgagtccgcagatccccgcacgtgacacaggccaggcatggggacggggagttcctcgtcgtccgttcccactcagatgctccctgaggttccggaacaccccgccccccatcccaggatctgaccaaccctcaagccacggccggccccggttccgcgagacgggggactctgaggattgtcctcccttccgggctgggactcccccacagcagccgaccgcccccagttcagagtggcccggcccgcagcgctccccgggcacaggtcccaggtggacggctccgctcccgcgcccggctcctctgcccgccaagcgccccggggattccccggcctccaagcggccgcggccgggtggagtcagccccgaagcccgggatcccccgaagggagaaaacccgctctgctcctctgaagcggcgggagaaaccggccccacccaggtccgggggcccgacgccctcggcggaggccggctccaggggtccgaggttcccgaagctggaggccggctccgccccggcgtccccccgccgccacctccgcccccatcccgcgggccggcggagggaggggcggggccgcttgccgcccgcgactcgggttcggcttctttagtgattgcttctgcttctcccgcgccagctgtccccagctctggggcaacgctgccaggtgcccagtccccgcgctcgagagagcgcctgcctggctctgaactctggccaggaaggggcgcgaggggaaggccccgggggaaggcgtgtccccgcgccccgccccgccccgcctcggaaagcccccgcggtcccgcccaccccaggggctcgctcagcctccggagacttttttctttgagcgcagccgcctggtgccggtttccgccgagctggagcgcgcgggccacggcttctctggggacgcagaagcgagaagcggggacctcggcgcgcgccccgcgtcccgctcttcctgcccgcgccccggcccccggcccgcgccccggccgccggcatggtgctgctggccgggaccgggccggagggcggcggggcgcgctgcatgaccccaccaccgccgtccccaccccggggcgcgcaggtcgaggaggaccccgctgactacgaagagtttgaggacttctcgagtctgccagacacccgcagcatcgcctcggacgactctttctaccctttcgaggacgaggaggagcacggcgtcgagagcgcggagagcgtcccggagggcgtcccggaaagcgtcccggagacggcgaccctcctgcgcgccgcctgcgccaacaacgtggggctgctgcggacgctggtgcggcgcggggtgagcgtcgaggaggcgcaggagactgaccgcaacggcagggtaagcgggcgtccccgcaggatttgagccccctcactgcccccactcccctcctccccaccacatccccgcgcctcccagctcctggctccggaccggtccctcggtcactcagccgccgcccagagcgccttttccccgctgtttgggagcgcggtgccctgggtggcttccccgtctcaggctgggggacgcggtgcggggagggagcagtcgaggtgtcagcgcggcagaaacgccagtccggcgtcctcaccgcatccccttctcgtttaccggtccccgtggacctcctgactgaattcgcgctggctgcccgtgctgcaatccaggatgggcttcttgcggcccggtcccctcctgactattacctttccccaggtccctggcaggggaccattcctcctcccctgcaggagacagcccctcctgcccagcgccccatttggcccctgggcccctcgcgccgcccttgtcctaacacgctggggcgcagatcggctcctccagccgcaatgatttggaagcaacagtttcttccctcgccgggacagcttggtcccctaccccacctccgctgagctttgtggcccgcgccgcgaccagccaacgtgatctctgactggtctgtccgcaggtcaccttcgcgagccaatgccagccggggctccccagagtcagggcatagggagagccccagagccgcgggcatccacccgggtagggcaggaggcgtggaggcaggcacaggctatcctttcgttatgaccagattcagagaaaacgagatgtttagaaaagaaaagaaaagaaaggaaaagaaaaaaagttggcttaagaagacctgagaaggactggctggtggaacaccttccaccaagcaaagcacttcaagggaaaactgcagagtgaccacggtggccaagttccccgtagtctgtgctcagtgggcaaatggcagcgttctcacctgatttttgtattgtccaaggaccgtggtatctgcagatgcagcctagcacaaatgcacatgctttttgctcaggagcctgcagctgacagaaaacatgtgctttgacttggggacccgggtgaccttgtgcctttggtttatcctgcagtgggtggggcaagtggtttgccctgactgtggtttgggctgggcttaggtggatgggaagccctccaatgtcactctccccttgtactacattgcccccgtgattcaattacctcccaccgtgtccctcccacaacacgtgggaattcaagatgagatttgggtggggacacagccaaaccatatcacacaacatttgaacttggaggaagggtctgtgcttgtcatatgttaggcagtgagacctgaggtggcgtccccgtaggtagcatcacctggagccctgtagttcctgctgccattcctcttgcaatgcctcctcccccagccctggcgacagatgccctggctggcatgtgattagggcttggagctccacccgaagtcctagggcctgtttctcaagttctacatttggtttaactgagttttcaggcccagatgtgtgtaatcagaaaccttgctttctggaagccagtatgggggcccgctttaaaggaagcctcaccaagctcataaaggaacaggtggggtgggcctctccccctgtcctgggcagcctggtggtctccagtgggctggaatgggcacaggaggggcctggctcgcccagtccccactctagggcaccactgggctcagctttatataatgtttcctttaggggcaaaacataaatgtttgaaaacagctgcattgaagaaaactgacagcaacgtaaaccatccccaggggctcgagcctaacagactgagtctccaggccacacagcagagaggcaggggagggccgtggtatgggaggctagctccagcctcccagcagctctctgcctcagtttcctcgtctgtaaaatagggataagggcagcctctcctcttaggatgtgagcataaaatggcttagtgcccacaaggctctgggaaggcctggccccaggcttgtgtttaccatcgtgtttctcattcgtctgccttctcttggcttggaagagagcaccttccagttttattttgttttgttttgttttttgtcttctgccaggcaaggctttttctctcgctgcttttcttcccctttgattacagcagaagtgaagactttgtttctctgtgtcacgtaaaataatgatgtaggcccggacatagcctgctaacttagagacccttggactctttcatctttggatcagacggagcagggcttgtgttctgtgctttgtgaggccagtggggggagcgaggcaggagcctccattcttttcattagcttctcaaggctgttgatcaaacagcctctatcttcctgaaaaacagctgaaagaatcaagtgtggcaaagccctgatgccctgctctgtggtaaatggagtgagtcattgccaaagtgtttaccgcagacctactgtgctcccgctaggtactttagcagactcaaaactgaatctggcagtccctgcctttgaagagtcctagccttttagtgaggagaagaacttgcagaggaagagcggctagctgagacctaggaaactgggagacggactgcttttcacatgacggtgtccggtctccccgacggcagtgtgggtcactccctctctgtctgcaggctcctggtttaagggcaccttccctgggaggcttttctgtctcctcttgtccaagcctacagaacctggagctgagcaagggtaatgtaggcattcacacatttagggctgaaattataaataggatggtcatttagagagcaggtgacgtttgagcagagacggcatctaggggaaagaggagttagacggagggaacagtgtgtgcaaagactgaggtgggaacctcgttggagcctggtctccaagcttatcatgattagtggcagtgaaaaccttaaagaaggcccggacagctttggtgcagtggaggggtaattgcattaatgacagaatgacagctcacagatacagcccacagccggctttctaggaggaaatgatctctaaaggcgtctaaacttttctgggacatgcttgttgagctcttcatctctgggcatttaagaagggagctttgcctgagctgacaggcattccatttggtctgggtaactaagggtcagatgtgttttgtttaagaaaatgcattctctcctgcctcctgagattggtagaatgttggatgtggctcagcacaccattttccttctaaaatatttattgctctaaaagcattgcatgatttaatatgcaacatgtaaatatttgtcagataattgcccaataacattcaaagcttgcttccaatgtcttctggatttatggttgttttgttccttctgacttgaggcagtgcaagctgccataattctttttcttaattcttctcttccacttactatcacctgaagttcacctttatggccttggcggctcttgagatgacagtgaaaacacacaaagtgtgttgttttaattgttgcagaagggcagtttaaatgtcagacagctcttggacttaattaggcccaaatacatgctcaatttaaaatactgcactcctgtcctgatgggattctgcttctgcgtgttcgtgtttgtttttgagactgagtcttgctctgtcactcaggctggagtgcagtggcgcaatctctgctcactgcaacctccgcctccggggttcaagtgaatctcctgcctcagcttcccacatacctgggattacaggcgtgcgccaccacgcccggctaatttttgtatttttagtagagacagggtttcatcatgatggccaggctggtgttgaactcctgacctcaagtgatcctcttgcttggcctctgaaagttctgggattaccggtgtgaggcaccgcgcctgccctgcttctgcgtgtttaaatttccagggtctcttggttacgttttccaaaggcccctccattggtttgttttgttaggtcagcaaagcccacatcacacccagtgtgggtgtttccctttactcttgaggtgcttaaaattaaaacttaattttcatagatttatagcgatgatcagggctttatcttgaaatgtatgtgagaaagtttttatttatttatttttttaatacttccgaaagatttataagctccagaatcacttttccccaaaaatgagaatccagttattgcaacagccctccgtctttaccaggcctcggtgctcatggcctgcgtgtgcacagcaacgggctgactagcatagaaagtgacttctctggttcttgttagttaccatagaaagtgaattctggcctcaggcctctgtatgcttgcggagggcctgcaagcacaagctttgctttttaggaatgtatgttaggctgggcgtggtggctccttcctgtaatcccagcactttgggaggccgaggcaggcagatcacttgagcctaggagtttgagaacagcctgggcaacatggtgaaagcccatctctaaaaaaataccaaaattaggcaggcatggtggtggacgcctgtagtcccagctactggggaggctgaggcaggagactcgcttgagcccaggaggtggaggttgcagtgagttgagattgcaccactgcgccccaggctgggcgacagaacaagacccgtgtttgaaaataaataaataaataaataaataaatagaggcatgtatgctagtgttttagttgcatctccaaattctgaactgtgagaaagcgggtgaggagggcaaattgagcagaatcctagaccgggagtccgaggggctggagtcagaggaggtctcagctgaaatgggcttggcgatgggtgggctggcagatgtctgcctcttcctcttctgctgaccgtggtggggagcattctgagtctagcagcagtagagaggcccatgtgttttttgtttgtttgtttttgtttttttgtttagagatggagtctcgctctgtcacccagtctagagtgcagtggtgtgatatcagctcactgcaacctccgtctcccaggttcaagcgattctcccgactcagcctcctgagtagctgggattacaggcatgtgccaccatgcccgactaatttttatgtttttagtagagacggggttgcgccatgttggccaggctggtctcgaactcctgagctcaagtgatccacccacctcggcctcccaaagtgctgggattacaggcatgagccactgcacccagcccccatgtgtttttgatataagaatgtcagtcatctgtggccacaatcatgctgcctaccaaatagctacaaaaccttacaggtgtttacaactgtaaatgttttgttgggggtggcctatctcagctgatgtaggctggatttgctcattcgtcttcattcagctggtggtcagctgcgaatggcaagaccaaaacagtcttaactgggaggactcatcgctgctccatttggtctctcatccttcagcaggctgtctcggcctgttttccatggcaggggcagggttccaggagagcaggctgagcaaatatggcctcatgatgcttcagcttggctgaagcatcacttctggctgctttgtcacgtattgcttctttattttattttatattattttgagatagagtctcactctgttgcccaggctggagtacagtggcataatcctagctcactgagccttgacctcctgggcacaaatgaacctcccacctcagccttctgagtagctgggactataggtgcacacctccacgccaggctaatttttatttattttttgtagagacaggatcttgctatgttgcccaggctggtctcaaactcctggcatcaagcagtcctcctgcctcagcctcccaaggtgctgggattataggcatgagctaccatgcctggcctcctttattcttttcagattctttaacaacatgactcaaataaccttttttttttttttttttgtcaattaggactcattaaagaagagaaaacaggcatttagtttttaaaaaaattccttggtataagtgtgtttgtgtttataacattgtaattattattattattggtcagctgccaacctgaaaacaaacaacaggtagaataatctacttcaagcctgtacttacagtgctaatttcccccatagtctgtgactttgcccctgatctacagtgtgaaatggagagagggctctgctgcgtttgggtttcttgagtacttattttaaaatcttatttgtttatttatttatttttttgagatggatctcgctctgttgcccaggctggagtgcagtggtgcgatctcggcccactgcaacctccacctcccgggttcaagcgattgtcctgcctcagcctcctgagtagctgggactacaggcatgcgtcacgatgcccagctaaattttgaattttgagtagagatggagtttcgccatgttggccaggctggtctcaaactcctgacctcaggtgattcacccacctcagcctcccaaagcgctgggattacaggcctgtgccaccgcccctggcctcttgagtatttatttgagccaacaggtgtccacactggggcttgtgcctggaacccagagtgtgcttttcatttcctagtcctgatctccagctctgatttttttagattgaggaaatatccatcacctcaaggggttaatagttttctgaaataaatttaaaaaacaaaatttggataaatttaaacaacaatgacaaagttgaaaaaaatgtgagtccagatttctgaggtgtttgcaccaggtagtctcccagagatggtggttcccagcttggactgtacattagaatcatctggaaaggtctataaaagtccaagtgcccaggccacatctcagaattaagtgagaatctgagggtaagataaggcatccgtattttcttttttctttttttttttttgagacggagttttgctcttattgcccaggccggagtgcagtggcgcaatctcggctcactgcaacctctgcctcccaggttcaagcaattctcctgcttcagcctcccaagtagccgggattacaggcacccgccaccatgtctggctaatttttgtatttttagtagagatggggttttaccatgttggccaggctggtctcgaactcctgacctcaggtgatctgcccacctcggcctcccaaagtgttgggattacaggcgtgagccaccacacccggccagggcatcagtattttctaaaactcccagagtcatttcaatgtgcagccaacactgacaatcactggtgcagactcttgaactcaaagtggggtcctgagacctggagcagggggttccctgctggggaacttgttaggagtgcagaatcccagccctccccaccaagacctgctgagtcagggcctacttttcaacaaaacctgccaggggctttggaggcaatggagcctttgagaagccttagcacagagcatctcattctaccctcggagccctgtgatgtggatgtgggtgtctgtgatgaatggatgaagttacaggttcagggaggtgccataggtgctcccgtggtggagccaggaggcagttccggtgtggtctgagtctgaaacttaccatccccacaacacatggcttcacctactgcccatgccgcagcgttagtgtcaggcagccccgtctgggcctgttccccaagtggacactggaatgtgacttctgtctttccttgtctcagaaaaagtgtgccactatgaatgcacttaacacccttcactgggcacctctgctgagcacaggctgacgtggttacacctgcttcttcctgggcctccctgtccatgcctctcccagctggaatgtcccttgccagaagtgtgggtcctaattcaagggccaggtaagcatcccagaaacagaggccagagagaaatgcttcattcttcattcccatctgatcagatgcctacttctgatctgagtttcatcagacctgacataaatatgcctctggaagcatacgtcgttatttctctgtttctttgaaattgctctcaaatcccaccactccaatccaatcagttgccactgagccagctgtgacatgggatttcacttctacctcaatttctgtatctctgacttagtagaaataagtaaaatccaccttcaactgtcctttaaattcagggacatcatttaaaaataatctcttccagctgggcgcggtggctcacacctgtaatcccagcactttgggaggccgaggtgggcagataacgaggtcaggaaatggagaccatcctggctaacacggtgaaaccccgtctttactaaaaatacaaaaaattagctcggtgtagtggcacacacctgtagtcccaactactcgggaagctgaggcaggagaatcacttaaacctcggaggcgggggttgcagtgagctgagatcacgccactgcactccagcctgggcaacagagcgagactccgtctcaaaaaaaaaaaaaaaaaaacctcttccaattcttttatggacatacatactgtattagtctgttttcatactgctgtaaagaaataaagaactgcctgggactgggtaatttataagaaaagaggtttaattgactcacagttccacatggctggggaggccccaggaaacttacaatcatggcaaaaggcaaaggggaagcaaggcatgtcttactacatggcggcatgagagagtgagagtgaggggggaagtgccacattaaaaccatcagatcttgtgagaactcactatcatgagaacagcaagggggaatctgcccccatgatccagtcacctcccaccaggcccctcctctgacatgtgggaattacaatttgagatgcgatttgtgtggggacacagggaaaccatatcacatacttaatgacatcaaggactcctgacaccctactttatcttaaactctgacatcatcagatctacaaacaggtaacaccatcatacccctccactccccatcacaaataaaaggggcctcctctcagtcatgctcttcacgtctgtgtggctgccatcaaccccttccttgccccgggctcttttacacacgcacaaacatgcgtgagcaggcgtgtacacacacacatacacacatatcattccaccggctgtgtagaagatatccaccttttgtgaatgaaacatattttctattttctttgttcacatattttagtaacttttctacatatttctttcaattaaaaggatttatgtattcttttacatatggaattatcttgacttaatttggagaaaaatttcacatggttatgatttagaattattagcccagtaggctgtaaagccaagctcaagaaaattcaaaaaaatggtgtcataaacaccatgttctctgaatttggttaattttttttttctagatctaacacaattctaaataactcctagataaaatgggaaaccataatgtaaattgagctgaaaagtaataaaaatattacatatcaaaatttgtggggaaaagcaaaagtggtatcttgaaggaaaattacaggtagcataaaactaaaggaaagaaataatcaaatgaaaagcagaaattgatgaaatcatgaagattatagatccaggacaaaagctgattctctgaaagtaataataaaatagatatttttgacagtagctgtcatcaaaaagagaaatagcacacatttgaaaatacaggataacaggttatagcacagttaaaacaaagattaaaaagagatcctgtaagaatgtcatcctattaaactttaaaactggccagctgcagtggctcacacctgtaatcccagcactttgggaggctgaagcgggagagctgcttaaggccaggtgctcaagaccagcgtgggcaacatagcaagactttgtctctacaaaaaaaaaaaaaattaaaacttagtcgggtgtggtggcacatgcctgttgtcttagctactgggaaggctgaggtgggaggatcacttgagcccaggaattcaaggctgcaggatgagctaggatggtgccactgcactcagcctggatgacacaatgaaaccctgtttccaagaaacaaacaaacaaacaaacaaacaattctcacttaagagtcttgctggcaggctgggcgcggtggctcacacctgtaatgccagcactttgggaggccgaggtgggcggatcatgaggtcaaaagatcaagaccgtcctggccaacatggtgaaaccccatctctactgaaaatacaaaaattagctgggcgtggtggtgcacgcttggaatcccagctactcgggaggctgaggcaggggcagaattgcttgaaccagggaggcggaggttgcagtgagccgagatcgcaccactccactcgagcctggcaacagagcgagactgtctcaaaaaaaaaaaaaaaagagtcttaattctatgccattgttgggccttacctttatgaataagtaaacagggcctggcaaacggaaccagttttctgtcctttagagctagagctaagggtaaatatgacgggcagagtcccctatttaagttggagagctttctgtaggttcccagagcatggctaacaccatctccagagaccttctgctgcacattcaagcacttctaggccactctgcttcccttcacagggacaccgacttacccttgctgatttaaaaataaaggaaggccagggaattacagggagtgaaaagagttggtctcagaaggttatatgctgtatgcttccattgacgtcacagtcttgaaataatgccgttgtggagatggagaactgatcagaggctgctggggccgagcgtggggaggggagaagtgttaccataaaggggtagctggagggggcctttcagtgctggaacctttttgtgccttgatggtggtggttacaggaagctacgtgggggttaaaattgtatagatggacgtatacacacacacacacacacacgattgtgtgcatacaggtgcaatctgaataagctgcatggattccagcaatgtcaagttcgtggcattgttattgtacagtaattgtggaagatgctacctttggggaggacaggtgaagggtacaagttcttgtggggctgtaactatttcaaaataaaaagttgaatgagcgtgaaaagctgcacgcatgacctttttcctgtagccttgtttccatgaatcgattgaattttggacatgaaagcagggtcagacctagttattaataggtgggaagaggactcactggaaatattgggcaacagaacctggctgccttcactgtggttcatgggccagcagcgttggcatcgcctgggagcttctaccaaatgcaggatctcaggcccctgagaatctgcatttcaaggtcctgagatgatttgcacatacatttaagtttcaggagttctagaacttttcttagagtagaaatccagtttgttggttgcatgatcctggacaagtcccatgatcttttgatctttagtttcctttagatacccatctagaaactgggaggcttactatgaagataataacacctcctagaggttctaggcagaactaacgagtaagttacagagaatgtgcttgtgctgtaatagacactcagtaaacagagctgttgtttctatgggcgaatgaatctccagatggttttccagtactgctagttccattttagccaaggggaaaagtggaagcaaattgaatgtttaaccaaaagaagagtagttaagaaaatagcacatccacatggtgaggcctcttttgtaactgttaaaagtggcagccagtgccatggggagaagcccagaagagagcagaggagggtgctggggcttctggtgcatcctgtgggcacctcggatgacgcgagggtggagcctgaaacgctggcccaggaaatggaacagaagcctgttgtgggtgggaggagaatcggaagcggcataaggagagtttttcaagaagggggaggaagctggtgccggggatggtcacaagcctttcctctttcttttcccttccctttcccctttccctttcccttccccttcccctttcccttccccttccccttccccttttcttttcttctttgagatggagtttcactcttgttgcccagtctggagtgcaatggcacaatctcagctcactgcaacctttgcctcccgggctcaagcagttctcctgcctcagcctcccaagtagctgggattacaggcacccaccaccatgcctggctaattttggtattttcagtagagacagggtttcaccatgttggtcaggcatgtctcgaactcctgacctcaagtgatccaccagcctcagcctcccgtagattacaggcgtgagccaccgcgcccggccgcctttctcttttcttcagcaccagttactgcaaagacccctggagtcggggcccatcctgggtcttgcagggactgattctgtccggtgtcgggctatgcacaggcagctgtggtggattcctgggttctccccacatctgcttccctttaacatgtcaaggcagccatccaaagggcatgaccctttccatgtgtagcgggagggtcagtctgtatcgcttccttctagaccttgcagcttttgtattttaaaactcgagagacaatagtcatctcctaaaaatagcagcagtgacatagctccgcagtcagttttgctggcactgggaattcagcttttgtctctggtgttagataacgggcaggtttctaggaaatgaattccatgtacagtagagccaggttcagttgacctcactggagaccttgaacccagcttgctgcaccgtggggtcctttaatcatctccctgctgacctccatgctttggagggtccaggtcttagggggacctgtttccttgggagtacaaaggccctagacacttaagagtcgcgtttcaggaagctggcacagcctgtgaggggccttcaggagtggggaaaggggcagtgccttgtcacctatatgtcctctgttgaagagtgaactgcaccaggccatctctgaggctctttcacacactgtgatgggtggaaggccactttcagctgcaagtacagaccctgtagatgatcagctcattctagtttgcctgggactttccggttttttgtttttagcactgaaaatcctgtatcctgggaaacccctctgtccccaggaaactgggatggttagtcaacctgcctatgtacaaggccacccttaggttgaggctgcacacagagtgctgcctaagagaagctgaaggacccaccaacagcagaatttctcctttagcactatctggcccctgactttggaggaaagcagcatgttaagttacattatctggaaggaagcactggactaaacttagtcccttatactggattcttttatcacacaagaaagccatcacccagccaagggcaggacccgcatggggacacaggacagatagatcttcttggggggattttgggagataggacagcccttgatcagagagggcccatggggtggagggtggggctggattggagttggggaaatgtagattaaatacatttcttgaaaaaaattcagttaagatatgctagagaagctacggtcaatttctttttaatagaaataatcatttttaaattttatcaagtgtaaacaaatctgaaccgttgggtttgtttatgaggcacaagtatattgagttaattttgaaaaaccccaaacctatctcattttttagagatagtgacttacagtgactctactaataattttattgggtctaagaatacttaagatactcttggctgggcgcagtggctcatgcctataatcccccagcgcttggaggggctgaggtgggtggattgcctgagcccaggagttcaataccagcctgggcaacatggcgaaaccccatctctacaaaaaatacaaaagttttctggtcatggtggcatgcacctgtaatcccaaccacacaggaggctgaggttggagaatcatctgagcccaggaagtcaaggctgcagtgagccgtgatcgcgccactgcactctagtctgggcaagggaagtgatactgtgtctcaaaaaaaaaaaaaaaaagatactctctccttttttttttaattccccagttttaatctggtagagggaccttgaaaatacttaaatactcatatcattcttatggattggtttgggtgtgtgagttctaacatagacaggaaggctatttttcctatcaataacatccaagaagcctgctaagtaatggtttttttttttttggaaaaaccatttggaaaagaatagattttcctgaactttattaaaacacaaatcaggtgctgaagggataattttgaaattctgtattttgaatgtctttccacttgcagaagaggtatgtagtttttaaaatttctgaatagaactacttgtgcatgactttgaaaaagtcactttcactcaaaaaataccaggttctttacctggaaaattaatcagtgcacatatagatgatctctagctctaaaaattgatgggattctatcttatgatttaaaaaattaaatgagtagtattaaatgattaaaataagtagtcacgggatgactaggaacagaattttttttttttaaagaaacctagtgagaaaggtcaaagtaatgggaaatccccaaaaagcatagtaaaaggaagcaatttgaaagtgaagaaaaaggaaccttttaaataacagctgtattgatacagaattcacataccatacaatttaaccgtttaatgtctaccgtggtttttatcatgttcacagatttgtacaattatccccacagttaatttcagaacattttcatcaattcagaaagaaccacataccttttagcttttaccctctattccccaccccctccagccctaagcaaccattaatctactctgtctgcctgtttacatgatttatgggaggatttttatgaaagaaccagatccctgtaattttatgtccccctatcttgacattttcctcagtaagagagtaggacaatcactccaccaccaggagtggctgccacatgcaagacatatgtgggttctacctgcaagggtctcaccataaattacctgtcaattacagtggaggatgaggggctgagtcttttaaagtatgcagagccctaagtctgactcattctgtgttgagcgttgggccacactgtctgctcattcatctctagttggtttgctgacctgtcgctgcagaggtcctccgagtgtggtccccacccagcctcacttgggacctcaccctagaccccttgctggggcagcagggtcagcactcagtattgagcaaaccctccagcggattatgttgcctgctcgagtttgagcaccatggatgtttcttgtcccccacccccagccccaccctgccacccttcaggttttctctaccctgctttcttttctgaagagaaggttgcagttggtttctctggatcttgtctgttctctctcactcttttctttcttttcttggtcctgcctccggtttggggtgggggcagctctgtggagagtaggccagttggctttgcctttggtggggtgtcgggggtgaggcttgggagggactcgggagtggagagatgttgacagaaatctgcttttgccagtggctttggtccggacttgcccctggaccaggtcttttcagtggcctcctcccactgcctcttccatccttccctctcttctggttctttccctccttttcatgaacatatttagatccctcctgtcattaaaaacaaaaccaacccaacactccaaactcacttggcagtgggttgggctctggcaggtcctctaagtcttctgcttcccaaggccaaagggctgccagtcggtgggtcccatgtcctcgtcctgcctccagccttggggtgggctggttctgcccttgccagcccagggcttctgccttctcaggctgcttctctgcagtgtgtattggctttattggtgggtgtcatgaaagcatctgtgcctggggcctggtcccaccccttaagtcctgatttcttccccatcccagccactgagacttctcatgaccttggcagggctgcctcctcctcccccagtgttttgggcactattgtcagaattggaacatgatgacaaacctgctttggggactgggatgccagggcagagtctcagattcccttggccccctgcctttcagccaggtgtcctaggggagagcagcctgtttgaggtgcacggtggcctggccctctgggctcgccaacaccgtggctcctaggaactgctctgcgtctgggatcctctaccctggatccgggagcctctttttgctttttgcttctttacactgctcatttttggtctcccctggatggtctggtttcccttcctttgttccatgaggcacttttcataggctggcctctttactccctgtcatggttagttttatgagtcagctgggctaggccacagtacccaggtattcagtcaaacactggtctaggtgttcctgtgcaggtattttgtagctgtggttaacatctacaattagttgactttaagtcaaggagattaccctctataatttgggtggacctcatccaatcagttgaacaaaaactgaggtttcctggaggagaagaaattctgcctcaaagctgcagcctcaactcctgcctgagtttccagcctgcctgcctgccctgtagattttggacttgccagcccccacaatctcatgagccagtttcttaaaataaatctctttatgtctgtatctcctcttggttctgtctctctggagagccctgacttatgcattcccataggaacattgtctgctggcagagcctcctcaggctcacgcagctggtgccagctctcagccctggaccactttcctaagagtcatgtgtgcattcagcctcatgtgcagagttcctcttgccagtcttcccccagcatctccttcttaacgtattccttttgcctccagggccagcttcctgggtatacagcctgtccagttcacaggcctgtgcttaaaagggccctatgtctgatgtaacactctgctgttactgttttgaaattcttaatggttttgaaccagggcctgcattttcattttgtactggggctgcaaagtacggagctggtcctagctgtccctgcgtttctggctgcccgtgtttacaatcctagagtcagcccagccttcctcatctcctgtatccagtcatttcccaagcgggggggatgtccaccatgatggtctcccacatttcactggggtctcacttaagcaagtgctataaccccccgccctggagtctctcaccagtctgttctgctgccacttctagatttatcttcatgtatgtggcttttttattttctttttaacaacagcattgtctttggaaactctccctgcagggctcctcccaacagttctccagatgcttccctctgtgtcacagaagccaggtgacttgctgtcccccagctgtgcgctgtgctgcctgctccctgttccgccatggtggatccttgttccccatggaccacacacctgtccctcctttgactgcaaggccactcagagttcccctcccatggacttcccgtgggctcctttgccgcatggcttccccgactttggaccctcatcgcagttcgcaacttggtatagatgcctttcattctgcgttgttttatattgattggtggatattttctcttgaagcttggtcagctccatgagggagatgctcaacctcattcagtttctgccctgtgcagtccggcagtttgtcgcacatggttggtggatgattgtccctgcttttttttttttttttcttgtttttgagatggaatcttgctctgtcgcccaggctggagtgcagtggggcaatctcggctaactgcaacctccacctccagggttcaagtaactctcctgcctcagcctcccgagtagctgggactacaggtgtatgctaccacgcctgggtaatttttttgtattgttagtagagacaggttttccccatgttggccaggctggtcttgaactcctgacctcaggtgatcctccctccccgggcctcccaaagtgctgggattacaggcgcgagccaccgcgcccgacctgtccctgctttttgaacatgattcaagtatcgtgccctgttgccagttacatatactattttgaaaattcttaaaaataggataggtctcagcactgtggacattttggttctaataatcctttgctgtgggaacccgtcctgtgcatggcaaggtgctgagtagcatccctggcccctgcccactggatgccagcaccagtgccttcccctctgtgacaatgaaagtctccagacattgccagtttctcctgttgaagtcactggaatagggatagagactgaagggagtaagattgttggagttgtgaacctgagtgccttcttacctggaaggatctgtggtatttggcacgcctcgctgctctctcctgcctcttcctcaccaagagttttgtcaggtgttttttacagttaaagaatttatgtactttggtaggaaaattgtgtttaccagcccttccaacaggcggtcctattctgtaagatggaaaatacctataattagaattcctggctctgtaaatgcttctctctttgtgatttggagtgtttgttgttgtttgaatcttaacatttgactgtatttttctcttggagttgtaataagacaagggagcttttaaaagtgtaatctgaggagattaaccccaggaggcatgaaatatccctccgaagatcacagtcggtctttcgaggacatcctgccacgtttacccagtgcccggcgtgagcagcctagaagacgagtggtggcagctgccacctgcccggtgaaaatgtaattgacaggaaattaatgaggggccagagatgactgttttatgcctaacagaaccacatgacacgtgttttaccaagaaatcatacatttggctttgattttcaaagtgatttttatgaactaataacacttcaagcaggcactttctctgttggaattctccctttaaaaagaactgtcagctgggggcggtggcttatgcgtgtaatcccagaacttcgggaggctgaagtgggctgatcacttgagcttgggagttcaagaccagtctgggcaacatagtaagaccctgtctctacaaaaaatgcaaaaattagccagatgtgggggtacatgcctatagtcctagctactttggaggctgaggcaggaggatcacttgagctggaaagttgaagctgcagtgagccatgatcatgccactgcattccagcctgggagacagagcaagaccctgtctcaaaaaaataataaaaaaaaaagaaatgtcacaaaacaatttgcattaaataagcctcttgattcagcatgaagttgcctctttttcagtttaatgtatttatttatttagcaaatatttattggacaggggtacctgtgccaggcgctgttctaggggacagaatgccagacagaaatggagattgctgctgaagtggagcttacgtgattttgggggtgagaaacaataacaagctcaaatacatgcacctcttctcaggagggagcaagtgctcaggagatgggataaggtaggcagggaaagggttttgcagcactgggctggtgctgaaaatttccgtcctcgttgaggaaggaacctttgagtaaagacctggaaggaagtgaaagtcttgctgtttggaggtctaggaaagagccttccaggctggtggagcaggtggtagagctggaatgttctagaagagccagaggtcagagggactacagcagagcaccatggggagagggcaggagatgaggtcagaagtgaccagtgctttactcacaaagggaaggacagacttgggtaaggagagctggaggggaaggaagaagacccaactccagtggtaagtgagagctctgctggcgtcgtgttgaagtttggtcctctttgaagtggacacagtcttccagggcagatcttcttaggctctggttgtggtgagctcgtctcttacattgtgcttacttagatcaatgccttttcagtgtttgtttaaatcaacaagtgttttcctggatgcctacagagctggaacctgaggtcccctaaacattgtccttgatggacaaatccatatttgggatgctgatctgtggtccttaacttagacgtcttaggtctgacttcgagtctccacagtcatttccatttgacaaagggagtttaagcatgtgattagatggggtctgtggagcatgtggctttgcttgttctagggaaaagaaacgcactgagaaacacctggaattagaaagcacttcctgggtgtttgtggcttcctctgtcagccctggagatgtggctgcccaaaggcctgtgtggctaacaggtgtgctggagatgtctggattgtagccttgctgggagccctcatgaaagacaatgcccgggcccaggtgtttgatgggttaccatgctgggtgagggcgctgtgccaatggcataaagcatggggtcatggggtcatggcctcatggccatggggtcatgcgtaaagcagagctgtgggtccagggtctgacagatgggactcactgcagggcccctcctctctgtcctcacctgaagcagttgcatccatcagtccttcgcccatcccagagttttggtgatggcttccctgtgccaggctttccgcaggagactggaggccaagacaagtacaagccacggggctctatcatcaaggacccaacaggcagcaacataggctgtggtgaagaccctgaattctatgttcttgtgggtcttgggagtttctctgttgtctctgctccatgctaattgcatagcatttctttcttccattatgtaacaccgagaaatacagtcatccttcaggacacgtgaggaatttgttccaggactcccccacctatacccaaatctgcatatactcaagtcccacaatccgctttgtggagcccctgtatacagagtcagccctctgtaggtggatttcacttcccacgatttggttgaaaaaaatctacctataagtgtactctgacagttcaagagttgtttaaggttcaactgtaacacagccctatatgaagaagaaagaaaaggctggtgttggtgccacagccagtggctctctacttgattggaagttcttgtttagacctgatacactgtgagaatacgatgtgcgttgggttcttgtaactgtgtgtgtgtgtgtgtgtgtgtgtgtgtgtgtgtgtgtgtgtgtgtgtatactgctttcttctctttattttccatacagtttataagaggacattcagaccaacaaacagttctcatcttcagtcttttagtgctgaataagttttgctgtgtggcatcttaatgcgcaatttaggaaattgctcttggtatcttgcagtcacagccagattcaattggtgagggatctttccagtgcaaacatggccttttccaatacatttacatattctgggacattactcatttgtttcctggcttttaacagcactgcaaatatgggccttttctgaaacatttacatagaccaggacattattattcatgtgttgcctggcttttaaatcaacagcagtatttacttagctaagaaattgggagactctttagcctactgaatttaaaaaagcagtgaagtgttgggggtatgtgaagttttcattgtgggagagtgtttccaattttagtgattttatttattatttatttatttatttatttattttgagatggagtctcgctctgtcgcccaagctggaatgcagttgtgcgatcttggctcactgcaacctctgtctcctgggttcaagcaattctcccacctcagcctcccaagtagctgggattacagacgcccgccaccatgcccggctgatttttgtatttttagtagagatggggtttcaccatgttggccaggttgatctcgaactcctgacctgaagtgatctgcctggctaatttttgtatttttagtaatgacggggtttcaccatgttggccagacatgtcttgaactcctgacctcaagtgatccgcctgcttcagcttcccaaagtgctgggattacagatgtgaaccaccacacccggccagattttagtgatgttaaagatctttctgagtagagttactttattttcactgtgaatgatcacattcacaacatgatccttattcttttactcggacaacattgaatagtaatatttattaggtattttattattcttctgatacaatttttttttttttggtgtggaaaatgaaaaaaaaaagagaagtacaaagaaaaaaacaaaaaccagtcacctgtattcccagtacctggagctaatgatagtgaatttttcggtgttcttttctgacttgtgctgtgaaatatatatgctctgccagattagctatctgtaaagttatctatctataaataaagttttgagtcctggtttattcacttgtaggggtatttctatattagaaatacttcagaatcttgattttaaaaatccaacttctgcatatatcatagtttattcagtaattttgggtcttttttgtttctgaaattttttgtgatataaataatgctctgatgtatgaatgtctaaatacgtctcttattggctctctgggcagttctgtttagatcaattccaagaaggtatattattggtatgttattattgtacccagttttccttccaccaacagggtatgaaattgcctgtttcactatatcctcatgacactgaatgttaattatcaaaaatgttgaaacggctttgctgatcttcaaaatattaagtcatgcatacttattgtaaaatattcagataacataaaaaggtaaaatgccaaagatgataaaaaagtgactgcgaattcatgatctaggcatacttatgtatttgaggtataactttagcgacatttaatataatacggtacttataatcttttttccttagcaccttcatgagggcacctttctttgccagcaaatacatgtcgtttttaatgaccacaatgtactctttctggatatgttcgtttctttaacctgtggcttcctagtggacattgaggttatttctggtttgcagattagtaacaacacagagatttgcacatctttgtacagaaacctactgactctcttaggaaattgttagattttgtttcgatctgtggagtaagttctcttatttttgaaagtaaatgtgcctttccctaaggtaggattagactttcctccccataacatcacacttggccatgtcacttgctctggccaattcagtgagaagtgacttgtgtaacttttggccagaagttttaaaatccagcgtatgatttgccatatcctttttcccctcttccgggcaacccacaattttccaggtagagttttctccatcagcctgagtcttgcaagggaaaacaatgtggaaaaaagctgcatgccaaccatgtggcatgagcaggaagcagacgtttgtcgtatgccattgggatgtggagattgcttgttctgctgcacagtctaactcagcctgagtgcatattagctagtggctccctagagagagtgaacttgcttattgtcatcacttatgcatatgaatactgcctcagcgtccatctgcttgtcctgttcccagcttgtcatgcttgactaacatattttgaggcagtcttcacgcagctcctgttttcatgttctgggtagataagaccccataccctgagctgcttgaccacattacttctgctttaagcctcgggaacctgataaggtaacccccgagttcctgtgctgagtctcgtgcttccttcaaatgaactaatccaaccgtgctgtgggaaacccacctaggtaaccccataaaggatccaacccacaggcccctccgtttctcgttccccacctgctggtcgaaggagcaggtcctggatggctcctcccctcttctctttggtcttgccaggggtgctgtcctcttccttccagacctgtgagtagtaaacttgattcattttgcagtctgagtgtccctcactgtgctgcacctgactacaccaagcctcaccatctcacttaacattacaacactgaagctttctagcaaggtaagggagtacatttccttctacactttgccaacaccaattaatttgactctgtttactcttttccaacttgtcaaaaaatgacacctcacttttatttgtgcatttttgttgattagtgaggctgagacatatttcatatcacatgtttactagccctttgtatttctttctttgaactaatttaccaattcctttgtcaattttttgattagtctgtcttatcttcttgaggtctaaggatttttttacatatgctaaagttattatattctgccttctttttctaatttgtcatttaaaaaatcttgtttggggtttatagagtttcctgaatatgcggcttgatatctcttgtcagttttggaaaattctctgccattatcttgtcaaatattgtttttgttccaatccctttttcttcctatcctgtgacaccaaattcacacacattagaccttttataccatgctgcctgtgtatgttatgcttttcttcctatcttttaaatcttttttttttttaattttctgggcatttttgattaaacttatcttttgattcactaatcatatctttaccctaatctactatttaattgctttttacattcttaatttcaattatgctgtatttctaaaatttttgattctttattgattctagttctgtaataaagttcctcatttgtcattatttgcttttacatattagttattttaaagcttgatcgttctaatttctggatcttctggggatgttttctattttctgtttttctcttggccctgtctcctgatacatctggtaatttttggaatgctagacattgtgtatgaaaattgaagtagcactagattgtgttatcttgtccagggaggatttagtttgcttctggcagacagagtgggacagaagattgcagtctaggttgtagtttttataagatctggcctctttctggcctgtcttgtaggatatagcccttttggcttcctatagaaatatggcctgggcagatcatgaataccacttttgtctccttaacccaagcttatccaacccctggcctgcgggccacatgaggcccaggatgactttgaatgcagcccaacacaaatttgtagactttcttaaaatattttgagatgcgcgcgcgcgcgcgcgcgtgtgtgtgtgtgtgtgtgttttcagccagtgttagtgttagtatattttatgtgtggcccaagacaattcttcttccattgaggtccagggaagccaaaagattggatacccctccctgcaaaccctcgagagtatgaccaactctgcttagctcctcctacccttcactactgctctctgcttggtttctcagcacccagccttactcagcaaatgcccttagggaaagccatgagaatggaagcttatctcaggatttccgccttctttctggaatacaatcaggcctgcaagtcctggtcgtcttggaaactggatgcctccaaatggatatttagggaaaaaaagtattcagttgttctcaggggaaaagtgcctctgattgaagccagtttctcagagctgaaagtgagagtccctgtcatttgcctttttactttctttacactgttttgctgagaaggtttaaatttttatacagtcagatgtatctatttctttatggtttccggccttgctctattgcttcaaaatgctgtttctaagccaggtttatagaaatagtcatctacattttttttagtggtttttttttttttttgagatggagtctcattcggttgcccaggctggagtgcagtggcaccatgtgggctccctgcaacctccccctcccagtttcaagcaattctcctgcctcagcctcctgagtagctgggacaacaggtgcgtgccaccatgcctggctaattttttttgtacttttggtagagacaggatttcaccatattggccaggctagtctcgaacgcctgacctcttgatctgccacccttggcctcccagagtgctgtcccgcaccgagcctttttagtgtttttatgattgaatatttaatgattcatttcagcctgagatgtgagataaagatccaaccttattttttttccgtatgactgggacttttgtccagaactattaatgaattcatcttttgtgaagatctgaaatgtaatatttattgttaagcatatggtgtctcattaatattttaatttacattattttgcttactagtaagattatgtatattttacatgtatttactggctttttgctattttttggtttttctactcattcctttacccttgaaaaattgtactcttggtgtatttatgctgatattcaatataatatttctgtttaaatcattctgtgaatgtcactaatcttgattgctttttcatttttctttcaattttacttataattttgatataagggaatattgtatttatatagtaacttacattgtatatttattgttatcttattatttttagcttttgaatctcttttctccatcagtaaactattttaggatataagtatgtatgtatgtatgtatatatattatacccttgactttttagtccttttgtattatcttttgattttatggtgtgtgtgtgtgtgtgtgtgtgtgtttactgctcagtaatcaacttttccagcaatgttggttgagtcatccatcactgcccagattgctcctttaacacatgttcccctttaaagacagggtcttattttgggccatctgctttattttcttctcaccaatttgtgggaaaactttattcttgttagtattctactttccttgtctcttatttttgttaaacagagcatatatgtgatagaaaatagaatcctggctgggcgcggtggcgcccatgcctgtaatcccagcactttgggaggccagggcgggcggatcacctgaggtcaggagtttaagactagcctggccaacatggtgaaaccccatctctactaaaaaaaaaaaaaaaaaaaaaaaaaaattaggtggacgtggtggcggctgtaatcccagctacttggaaggctgagcatgagaatcgcttgaacccgggaggtggaggttgcaatgagctgagctgagattgcaccactgcactccagcctgggcaacagagtgagactctgtcaaaaaaaaaaaaagaagaagaaaaagaaaagaaaatagaatcctgcagatgagcttgcagtgagagaccccaggcttcttggccacctgtctgctcctcagagctgtctcttgccactgttcccactttcatttcatctggcagtcccctccctgccagttgcaacctgctcatcatagctactcttggtttgtccatttgaggcagtggagatgattgtgtgcaatggtagtggagttttttgctgacttgcccttttcacccctctgatcagacccatccacccatcctttttcatatgtattcttttagtttcttatatatgttatttcaaccccagttccttctccatcaattctagctggtatttcctgacttctcctctgttaggtaaggaccttcctaaccttttcccaccaccccgtatccacccctcatattgtcttcgctagctttccacttacgagactagtaacattttcttggatcttaattatgcttattatttcaactttatctatagtttgattctaaaagtagaaaacaactaacccttatattataacactacagctattattagttgagtcaactggcataataggactctctttttttctgtgcagtaacatattttaaattattatcgcagataatatattttgctctgtttacttttttttaaagcattagctattaactcttttaagaaaaaacaaaataaagcaaaaacctgtaccatcaatgaatgtacgaccccatctgcaatgacagaatactttcctcccctttagacactggatatttgagtggggagcttctcaaaggggtcatctacacatttgttgtatgacatttactttttagtgccttaacttgccttgtactgtacctcacctctgtctcagtcgacaccctaccctgctcatcccaaccccaccctgggtcaacctcctgttcaccatgactccagcccaactcctccaaccctagctcacctccagagctctgagtcttcacctctccagcctctctccaacctcttctcctcccgggcaggggggctaacatcagaccccgactcaatgacccactcactccccaacccctcaccctggctcaacttccctgaccctggctcacctggatccccattccagcacaacccccacccctctcaactcacttaccctcaccccctcatgaaccctctgccatttaaggatagttcatctccttttctgctgcaagactactcttggctgttgagctacagttttttcagacccaaggcctgtgctgtctctgagccgaattctggtcccgtggcaaggcagaacctgtcccagagtctctgcagtgagcaaagcctagagactcaacagcgaggagtaaccacatgtgggagctgtcagctcacggggattttctctcctctccaagggcaggaattctcttcattgtcacagacctattccttatttaaagctttttttcactcttattcagggagggatgtttaaagagatcatgtatttattgattgattgatctccaatactgcagaaaatatgcattttaaaaacacacatccttctttttttttttttttttttttttgagacagggtttcttgctcttgttgcccaggctggagtgcaatgcccaccacaacctccgcttgccgggttcaagcgattctcctgcctcaggctcctgaggagctgggattacaggcatgcgccaccacgcccggctaatttttgtatttttagtagagacagggtttctccatgttggtgagactggttttgaactcccaacctcagctgatctgccctcctcggcctcccaaagtgctgggattacaggtgtgaaccaccacgcccagccaaaaacacattcttctttctacttgttattcccttcgtgcatgcactcatccccatgcatgccgagggcacatgttctggaaggcccctgggagccacatggggttcacgacctcaaaactgaagccctcagagggtatttgattcattaggtggggtaagacatgaacctaagaagaacgactccttgaaagaaaatgaggtaacaggaaaggaattcactgatacatgtcaggaacccagagctgcctgcgatgtgggtgggattcggcactgggaaaccttgtgtgtgggtccttcggggaaagtgggagttgactgccgttgagcgggtaggaaagtgccttccaggtacaggcagcaggagtggtgattgtcttggtagaggatgggtgaactgcaaatagagttgaaggagctgggctgagtagttgggatttcactccccgggtgattggtgggacccagcagggccagtcctgggcttttcctatggcaagtaactcaagagctgcaggagcagatgttgttaagcagagaggaaacaccaaacatggatccctatctctagcgagtgtgccctgtgactgtggagggtggaggggagtcacgccagagggaggtgctgtgttggggccagaccggagggttacatcctgagcaggagaggagggaggaggccaggtggaggagcggcctgggggacataggtggttgtggtgctagattggcagtggatttttttctgaaggctgccgtaacaaatgaccacaaagtaggtggcttaaacatcagaaattgattctctcacaattctggggggcagatgtctgaagtccaggtgacagcagggccacgctccctctggcagagctgggaattctgcggtctgtgacagcatcgctccaatctctctctgtcctcatctgtcctctgcacatctgtgtctcaaatctccaggatgatctcatcttaggatccttaattatgatctataaagatgctatttcccaacagagtctcattcacagcgaccggggttaggatgtggacatgtcttttctgggcgatacatttcaacctactacaggcagttacctgaaggagtaactgaaggagaggggttcagaatcctccagtggggcctgatgggcagaggagagacttggacacccttaagagacgaaatgaatcttcagaggttcagccattgcttgcaatgtcatcttctgggctcatccctgcactccaaccctggacattttctctggtcttttctagtggccaccatctggatgattacgactctggaaatctctgtccatcatccatttttttgcctcctctgtgaacgagcaggtgtgatggcctgaaaacagagagggagaaggctgagtgtaccagggcaggggaagcgcttcctggaattacgtgtcccaggacaaaagtgaaactgccttcgctgactcataggaaagtttgaaaatatcatgtttcgcctatgcctgggggatctttgtttttggcataagccgaacagattgttccaggccagaaaaaaactaagccaaaccaaaacaacagaatgacttaattatgtaccagcaccctttaaaattaattatgcttgctttctttttgtccccctcaacttttagtttaagttctgaggcacatgtgcaggatgtgcaggtttgttacacaggcagtgtgccatgcccattgtggtttgctgcacagatcaacccatcagctaggtattaagtgcagaattctttagctattcttcctgatgctctcctgcctcacaccccctgataagcccctgtgtgcattgatccccaactgtgtgtccatgtgttctcatcgttcagctcccacttataagtgagaacatgcagtgtttgtttttctgtttctgcattagtttgccaaggataatgccttccagcaccatccatgttcctgcaaaggacatggtcttgttcctttttatggctgcatagtattccatggtatataagattatgtaaagagatcgaacctacaactgattggcgtacctgaaagacatggggagaatggaaccaatttggaaaacataattcaggatatcatttgtgagaacttccccaacctagtaagacaggccaacatttaaattcaggaaatgcagagaaacccagtaagatgctccatgagaccatcaaccccaagacacatcatcatcagattctccaaggttgaaatgaaagaaaaaatgttaagggcagccagagagaaaggccaggttacccacaaagagaatcccgtcagactaacagtggacctctcagcagaaaccccacaagccagaagagattgggggacaatattcaacattcttaaagaaaaaaaaattccaactcagtttcatatccagccaatctaagtattcataagtgaaggagaaataagatccttttcagaaaagcaaatgctgagggaatttgtcaccatcaggcctggcttgcaagagctcctgaaggtagcactaaatatggaaaggaaaaaaacactcccagccacaacacactgaagtacacagacaagtgacactatgaggcaacaacataaacaactctgcaaataaccagctagcatcgtgatgacaggatcagactcacacatagcaatattatccttaaatgtaaattggctgaatgtcccaattaaaagacacagaatagcaagctgggtaaagagttaagacccatcagtgtgctttcttcaagagactcatctcacatgcaaagacacatgtaggctgaaaatgaagggatggaggaaaatttaccaagcaaggggaaaacaggaaaaagcagggagtgcaattctagtttctgacaaaacaggctttaaaccaacaaagataaaaaaagacaaagaagggcattacataatggtaaaggagtcgattcaacaagaagagctaactatcctaaatatatatgcacccaatacaggggcacccagattcatgaggcaaatttgtagagacctacaaagagacttagactcccacacaataataatgggagactttaacaccccactgacaatattagatcatcaagacagaaaattaacaaatattcaggacctgaactcagctctggatcaagcagacctcatagatatctccaggactctccaccctaaaacaacagaatatacattcctctcatcactacatggcacttactctaaagttgctcacataatcagaagtaaaacactcctcagcaaatgcagaagaactgaaatcataacaaacagtctctcagaccacagcacaaactaattatgctttctaatgtgaacctctaattcttggttatatcttgtacatacatgtgtttttttcttttagttttggatttctggaccttgacatgtttaccaggagtactagattttcttgctatgttccttttcttggcatatgactttgatccttctgaggggttggagtcagaagccaattaccactactttttcctgcctcctcccacatccagatgtctgttctccagcctccatctcttctaagtttgccttctcctctcagtacctggatgtgaccaccccattcagtggcgtcatctctacctagtgactcctaggagacttttgagtattttctgacttctagcctgccccttctagcactctcaatgccttgttgcgttttaaccatattttatattttgttttttgtttttttttgagatggagtcttgctctgttgcccaggctgcagtgcaatggcacaatctcggctcatggcaacctctgcctcctgggttcaagcgattctcctgcctcagtctcccaggtagctgggattacaggcatgcaccaccatgcctggctaatttttgtattttttgtagagatggagtttcaccatgttagccagcctggtctcgaacacctgacctcagatcatccatccgcctcggcctcccaaagtgctgggattataggcgtgagtcactgtgtctggccatgatttttgttttgttttgttttgcttttaattaaaaaaattttttttaatgtttagagacagagtcttactatgttgcacagactggtcttggaactcctgggctctagcaatcctcccatctcagcctcccaaagttctgggattgcaggcattagctactacacctggccaatcatattttatgttaataatacttggttagccaggcatggtggctcatgtccgtaatcccaacactttgggaggctgaggcaggtgaatcacttgagcccagaagtttgagaccagcctgagcaacacagagaaatcctgtcttaaagaaaaaataaaaaaatactctgttgaggtataattgacatatgataaagtacagaaattctaagtgaacagccgtatgattttgacaaatatatacacctgtgcagtcatccccctactcaagatatagagcatttccatcaccatagtaagtttcctcttgctcctttctactcagtccctgtctcatcagaggcaaagacctgttgttcagatttctgtcaccatggattagtttagccagtattgaaaattcagtggaatcacacagtgtgcgctctggtgcctggattctttcactcaacataatggttttgagatttagccatgttgtgtgtaccactaggttgcttttttttttctttccatagttaacaactttattgacaattcatccattaaagtatacaacttgatagtttggggcatattccattattaatttttaaaattgtggtgaaatatatataacataaaattgttcattttaaccattgtaaccagtgtacagttcagtggcatttgcaatgttgtgcaaacattatcactatttccaaaatgtttttatcatccctctccccccagtccctcttcctcctcctaccctcttcccctcagcccctgataacctctaacctattttctgcctttatgaatttgcctatcctacatatttgcataaatagaatcatacaatatttgtctttttgtatatgggtaatatcacttagcatgatatgctcagtgttcatctatattataaaatgtatcagaatttcctttttttaaaggttgaataatattccatcatatgtatataccacattttgcctgtccatttatctgttgatggacatttgggtattccatgttttcactactgtgaataatgctgttaggaacatgagtgtacaaatctttgtttcaacctctgctttaaactcatttgggcatatacctaggagtggaattactggatcatgtggcaattctatgtttagctttctgaggaacaaccaagctattttccacagtggctgcaccacattagactctgaccagcaatgcacaagggtttgtttcttcacatccttaccaaacaaacacttgttatttttttatataggtgtgttttaaatggtagccatcctgataggggtgaagtgatttcttattgtggtttagatgagcatttctcatgactcagtgactaatgatgttgagcattttttcacaggcttattcagcatttgtatgtctgcataggcaaagttgctttttctgctatcattacttcattgagagataatttacatacagtgaaatgcacaactcttaagggtgtagttcagtgaattttcacaaatgaatatgcacatgtaaatgtcactcagattaagatatgattccattaccccaggaagttctcttgtgccattttctaataacccccttcacaattttttattaccatatacagtattaatcttgcctgtccttggatttcattaaatagaatccagcagcgtgcactttttggtgtctggcatattttgttcaatgtaatatgcatgagatccactggcattgctgtgtgtatcaggattttgttcttcttttgttgctcagtagtattcccaagtttgattatagcagactttgcttatctagtctcttgatgaatatttgggttgtttgcaattttgggatattatggataaagctgtcctgaacattcttgtatacatcttcatgtggatatagactttaatttattttgagagagtatccgtgaatggagttgctggctcataaggtagacatgtgttaaactttaatagaaactgccagtttcccagtgtggttcttccattttacactcccacctgctgggaacatgagagttccacacccttgccaacatttggtattgtcagtctttttaattttaaccattctggtgggtgtatggcggtatctcattgtgggtttaatttgcatttccctgtgactaacgatatcgagccctttcacatttggaaaaggttataatttaaattttgtacattaaaaaaaaatcaagttagaagacattaatgaacacctgcagaacagacatcccaaagcccagaatgtcatgtggaagccaccgccctgacagctatgagtcagacagacagatgtcagtttcagttacaccttaaatcacaaatgagttgccaactcagtttaaaaagaatagggttggggggcatatatttaaagaatattttgaaaatagaagaaaatgtggcaaggctgtctcctcccacaccagctcccacctgagagccagatagttagcaggaaaatctgatcacgctgctttctaagaccctgcgtggttctccaccaactttggatgcacttcagcctcctcagccctcgtggaagcccgtcatgacccagaattccccactcgtcagctccacgcctttgcacatgcttgcctcccgcctgggacacggtccctccaccatccctggcgctgcggacctcccaccattgcttggctaacgaggctcaacctggctgggtgccaactcctcccagcctgggcaagttgccagtcatctgtgctcccaccatcctctgggccgagcctggcattctcattgtttacttctctgcctccttccccagactgaatgtcctgaggggagggagtcgcatttcagcaatctttgtattttgaacacacagccagggaccagtaagcctgctgatggtgaataaatgctcatgggtgatgacgacagccagctgaaagcggtgcagccctcctccctgcggggcatgctctccgtggatgtgctggtttagtcacacacattttaagtgtgacgacacctatatattcctaaatctgtaagacaaagtacaagccacaatatctcgagatctgcccttctcctttgaccactccaccccagcctatgacagggggctgccatttccccccatggggccagggatgactcttggtagagcacccaggagctggtgcacatgagaacaagaccagttagggggcatgtgagggagtgctgtaggcatccaggccaggactaggtaagaatttatttggatttatatatagcagagactgggcaagacaagaaggtgggtgcgttgccccactgaaagaaagccaatcaagtaaaaatgaacaagaacacaagctgagctctgtgtcctgtgtccccgaaggggtgactgagcaacctcggtgcctgggtgtagagataacaccaccactgtccatcccggggcctcacccagggcgtcagcggagcatgctcacactttaggtcctgtagacaaaagtaattgcaggctcccagccaggagcctgggctgaggcctgaggatctgcatttctaacacgctcccaggggacgctgatgccgctggtcctgggactgcactatgagtggccaaagtcaaacctgcgcctggcagaaaacagtaaataggtcgtttggctcaatcattagccaggttgttaattctgcatccattggtttgggttgtactaaattaggccacactttttgtgaggtggaccagtatttgtgcatgacaggcccaatatttgtgaaaacattgccttgaaaatagttggagaattttatttctcatgaatagaacatgctgtcgtctgagagcctgcctcagagcagctggctgggagcctccggagtgggaaccgctttggcagagtaggtaaaacattcaaaaagggtttcaagtctttgagtctgaaacgagtggacaatgtagattcctttcatgaaattgtatgcagcattttgcaaggaacttataaagctgatcatagtctatagatcctgaaggtccaatttgctttccattgattgcttgtcatttttttttttttttgagacagtgtttcagtctgtcacccaggttggagtgcagtggcatgatcacagctcactgcagacttgacctcccaaactcaagcaatcctcctgcctcagcctctagagtagctaggactacaggtgtgcaccaccacacccagctactttttgtatatttttgtagagacgcggttttgccatgttgcccaggctggtctcgagcttctgagctcaagccatcctcccgtctcagcctcccaaggatctgggtttataggtgtgagccaccgtgcccggcctgatggtctatttatattctcccaactctttctagaaaaggatgggaggcagctttctgtcttctgtacagttttctcacagcccgtgaatccacttgtgtagttaagcaggagactgggaagcttcatcagaattttttcatccttaaaaaaaattttttttttttgagacagggtctcattccctcgcccaggctggagtgcagtggagtgatctcagttcactgcaacctacgcctcccaggttcaagtgattctcctgcctcagcctcctgagtagctcagattataggtgtgcaccaccatgccaggttaattgttgtatttttagtagagacggggttttgccatgttgcccaggctggtcttgaactcctgacctcagatgatccacctgcgttggcctcccaaagtactgggattacaggggtgagccactgtgcccagccccatccttaaacattttgtattttctgattattaaataaaaatagatgttcattgtagggaaaaatgagactttttacaactttttataacctattcagaatcaattactactgaaggcttagtgcatttctctcttgttttttgtcatgcagtgttaatagatgattttatataattgttttaaatgtatatttatcttatggtaatttaagcctttcctcatgattaaaattctttatatacctcaattttactaatatttgataaatgtaagattataccatagaaaaatgtttttttttaaactttttaaaataatttcaaaaggagaactttttttttttttttgagatggagtttcactctttttgcccaggctggagtgcaatggtgcaatctcggctcactataacctctgcctcctgggttcaagcgattctcctgcctcagcctccccagtagctgcaattacaggtgcctgccaccacacccagctaattttgtatttttagtagggacggagtttcaccatgttggccaggctggtctcaaactcctgaccttgtgatccacccgccttggcctcccagagtgctgggattacaggtgtgagccaccgcgcctggctttttttttttttttttttcagacagagtctttctctgtcacccgggctggagtacagtggcgtgatctcggctcactgcaacctccgcttcctgggttcaagtgattctcccacctcagcctcccgagtagctgggaccacagatatgcgccaccgcacccggctaatttttatattttttggtagagatggggtttcgccatgtcgaccaggctggtctcgatcccctgacctcaagcaatcctcccacctcagcctcctaaagtgctgggattacaggtgtgagccactgtgcctgaccaaaaggagaacctttttgaaaaaaaaaaaaaagaaaaaaaaaagaaaaatatagcactctcctggtgtcttctgggagtatagtgaagtccagagaggagattttcttagctgagttgcagaattaattatatctaatctcgctgcacctaacatctagtagatctcaatggctaataataaaatactaatatgttttatttaattatatattgtcttatataaacatatattcaactttaatgaatgatccagttctcaagacagaaacatagaattatatgttaatatgacaggctttggaaaattgtaactggattttgtcattattctatccttatgacttgttgatgtttgtattatctaatgctacatgcatcaccccaaaacacagtggctttaaataataattatcatttattttctctcacagtgtctatggctcgggaatgtgggaacctggttgggcagttctgactgagggtttctcgtgagttgcagtgggatgctggctgtggctgtagttgtctgaaggcttgactgaggccacagggtcctcttccaaagtggctctctctcgtggctggcacattggtgctggcagttagctgggggcctcagttcctctccctgtgggtctctccatagagctgcttgagtgtccacagggcgtggcggccggcttcctcaggagcctgcaatccaggagaccagggtgaaagctgcaagatcttttaggatctggccttggaaggcacacaccattactcctgccatatggggccagccctgatgcagcatgggaggtgatcaccaaggatgtgaataccaggaggaaacgaagatcattggggccatccaggaggctggctaccacagttgtggttgtgaatattagaagtacagggtatggaatgaataagaaaagtatactcatgacagacatacatggtactaggacagggtctgtgtttttgctgttgtaattcatcccctgcatgacctctttctcattgagtttctttctttccttttcttcttcctttttttttttgaggtggagttttgttgttgttgcccaggctggagtgcagtggcaagatttcagctcacagcaacctccgcctcccgggttcaagtgattctcttgcctcagcctcccaagtagctgggattacaggcactcgccaccatgcccagctaatttttgtatgattagtagagacagggtttcaccatgttggccaggctggtctcgaacatctgacctcaggtgatccgcctgcctcaacctcccaaactgctgggattacaggcatgagccaccatgcctggctgagtgagtttctgtgttccgctcttctagccttgctagttcctttaagttctctgtcgagctttgtacatctgttgtaaaaattccaagcttaatttcagaaagattaagtgaatcaatggttggaagaacatgtaattgttactgacagtcactgccttcaggtcaacggttaacaggcttagttttctttcatcacataatgcttgtatgatcactgcgtggaaaccactcccagtgttgggaaaattagatgagcctctgagataggaatagattaggtatatacatgaagttggcagagggaatacagttgaacaaagtagtggtttcatacattactaatctaaaatcataaatcccagcgagaggtttgcagtgataataagatttacgttttatgcaaaatttagtctaaagggaaattgttttgaattactgacaaccttgaatttatcaaatcctgattacagggctacaaggtgaccccatgttggaaggaattatcttgatgtattttacatatttatttattttattaataaaatgtcatttctttatttaaaacagtttattaggcatctctttatttgaagcagaaaagcatagataaaaatacaaatattggcctggcacagtagctcacgcctgtaatcccagcactttgggaggccaaggtgggcggatcacaaggtcaagagatcgagaccatcctggccaacatggtgaagccctgtctctactaaaaatacaaaaattagctgggcgtgttggcgagtgcctgtagtcccagctactcgggaggctgaggcaggagaatcacttgaacccacgaggtggaggttgcagtgacctgagatcgtgccactgcactccagcctggcgacagagcaagactctgtcttttttttttttttttgaggtggagtcttgctctgtcgcccaggttagagggcagtggcgcaatctcagctcgctgcaagctccgcctcccaggttcatgccattctcctgcctcagcctcctgagtagttgcgattacaggtgtgcgttactacacctggctcatttttttgtatttttaatagagacaggatttcaccatgttggccaggctggtcttgaactcctgacctcaagtgatccacccacctcagcctcccaaagtgttggggttacaggcatgagccaccacgcccagcccattttataagtacattttgtgcccaatcaagtatcaaagacataatcttaaaataaaggacagttcttcccaagggaaaaagaaagtaggcaacctgacacatgaatagatgatgtatgctactgttacacgcacacacacacactcagaatagactgtgatgctgtgataacaaaccacttcaagtcccagtggcttaaaataacaaaggtttgcctctcgctcattcatgctgttgtgcgccggctagagggggcagggctctgctctctctgccctcactccggaggcccagtctgggagcagttgcatctctgagcttcaagggcagtcaagtcaagaaaagggaaggtggcacatcgtccaccgtctctcgaaacttcctcctggaagtgacacctgctatttcacttacgtttaattacccaaagcaaaccagatggtcaagtcagaactcagaaagggtggggaaatgcaattttaccaagaggcaggaagaaatagataacggaataacgccagtgagtactgcagctgaatccagtgcaactgaattgtcctggttcaaacaattaaaaaagactttgtgtgtgtactttcaccagcttcttcacagaccgtcgcccatacttgagtgaatcttcctcctgtgcatgctactgtatatgataagtggaagagaatagagagtgttgtcagggacatttttgaggaatactgaagtctacttgggacagtgaaacacactggacgatgagcttccagctgcttgttttcctgctggactgtctgtgagttcatcttcttatttaaagctccttgttactgagtgcctcctagcagcagtttcctttagccctctctaggaggagcacaaatgcctattcctggcagcctgagcatgtcgtcttaggcgtcctctcgtgacctgtggtctggtgttttgcacaatcttcatcaccactccttctagaaggactgagaactgaatttgacttttaaaacgaagcttggtaatcaagaatagcaacagcaggctgagtacgggggctcacgcctatattcctaggactttgggaggctgaggcgggtggatcacttgaggtcaggagctcgagaccagcctgatcaacatggtgaaaccctgtctccactaaaaaaatacaaaaaaaaaaaaaaaaatgggcgtggtggtgcatgactgtagtctcagctactcaggaggctggggcaggagaatcgcctgaacccatgaggcggacattgcagtgagccaagattgtgccactgcactccagcctaggcaacagagcgagactccatctaaaaaaaaaaaaaaaaaagagccgtggtagttctgaaggggaagagcaaggaaggtttcttccctgcaaaacacaaggctgcagtagcgaatcaggattgccttggggctgaggtagattgttagaccaatgggagcaactctcaggttcattcctgtgtttatggggaggtgggatgagcttgagcatgctgttactaccaatgggaaaagaatggatgtgttcatatattgtgctaggaaaacagaaaaaggtaaaattaaacttctataataaaaaccatggtggattcaagacctcactatgaaaaaaaaaaaaacttgaaactgttgaaattaaatacagaggaatatctttagggtttttgaatgggaggcattgcttaaacgcatgacaaaaagcattcctataaaggaaaagattaataatatgactgcatcgaaacgtaaaacgggatggtaaatgaaaaacaagtggtgtcgagaaaacaatcgcaacacccttgacagagcttcaggtccaggggcagcatttacagaggcacctactctctgtggtgcctgagagggagcgcctctttaaatttggtgccccagggcctcctttgccacatcttagtgccagccttgggcgccagtgccatcctgatgccagctttagtgtctagggctgtattgcccagtagtgtagctggtacctccaagtggctgtggaacacagtgcaactgaggtgtgccgtaagtgtaaaatatgtactagattcatccaaaaaaggtaaaatagctcattaaaatttttctattgattacattttgaaatggtaatattttggatatgttgagttaaatacaatatatttattaggatttcatttggcttttattaatttggccactagaaaattaaaaattatcagccaggtgcagtagctcatgcctgtaatctcagcactttgggaggcagaggtgcgcagatcacttgagcccaggagttcgagaccagcctcggtaacatggcaaaacaccatctctacaaaaatacaaaaattagctggatgtggtggtgctcacccatagtcccagctactagggaggctgaggggggaggattgtttgagcctgggaggcgaaggctgcagtgagccgtgatgcactccagcaggtaacagaccaagacctgtctccaaaaaaaattttccattacatttgtggctccccttatgtctttattggacagcactgtcctcaagtattataaagaattcaaactgggctaggtgctgtggctcacccctgtaatcccagcactttgggaggctgaggtgggcagatcatttgaggtcaggggttcgagaccagactggccgacgtggtgaaaccccatttctactaaaaatacaaaaattagccaggcatggtggcaggcacctgtaatctcagctacttgggcagctgaggtgggagaatcgcttgaacccaggagatggaggctgccgtgagctgagattgtgccattgcactatagcctgggtgacagagtgagactccatctaaaaaaaacaaaacacacaaaaaaagaattcatactgatcaatgaggaaaagacaaagaagccaatgggaaatggacaaaagacataattaaatccttcaccaaagaggaaatccagacagccaatagatgcatggaaaggtggccagtcttactggcaatcaggaatgcgaagtgaaaacacaataacaatgtttaagcatccgattggtgaaaatgcaaaggtattgggaattggtgagaatgaagaaaaactgtaactttcacccatgagtggtggagttgaagttgttgcagccgctttggagaggactttggctcatgttctacccccagcttgtccacttagagcactggttctctcctggggcaattttgcctcccagggtgcatttggcaatgtctagaggcattttgggttgtcataaatgagggtaggagatgctcctgacgtctaatgggtagagaccagggattgcatagtacaggggacagccccccccccgaataaagaattatctggccccacatgtcaatagtgccctggtcgaaaaactgacacaggcgaggatcgcaattaatttccagctcaggtgcatcaggagatacagatcaaggttttaatttcagtgctctctgtatttgtagtcacagaactttggacacagtgtctatcagtttaggggcatggatgaacatgcagagacactatagcagtcacgatgcatttgccagtgatttggctgaatcacgtccagcactgcgtgaataaaccaagtttcaggctcagatgtacatggagagcattttgtgcaaatagttgcaataggaaataatgctccctattaaatatatcgcttgggcacagtggctcacgtctgtaatcccggcactttgggaggccgaggtgggtggatcacctgaggtcaggagtttgagaccagcttggccaacgtggcgaaacccgtctctactaaaaataaaaaaattagctgggtgtggtggcgggagactgtaatcccagctacctgggaggccgaggcaggagaattgcttgaacctggggggcggaggttgcggtaagctgagattgcgccactgcacttcagcctgggcagcagagcgaaactccttctcaaaataaataaataaataaataaaaatatattgtttatggatacatgcatatgtaataaaaattcaaaagcaaaatcagagcatacacagctgcaccaaatagtgatcacctctgggagggatggagaagaaagcacaaaaaggcatttcaactttttctgtaatgttgattcctttaaaaagtttgaagccgttatgacaaaatattgacctttgttaatgttaccaatgaagacatgggtgtttatcttacttatcttactttctattttacttttctctatatttggactttttctcataataaactctgatacacacataccaaagggcacttggaacaggggctgcctgagtctaggcagctcagtgggggttgtccctgtgtctgtgtggttcgcctgcttttccccaacactgatctgtggttaagagtttggtgcatggaacgttccatgggattctttattatgagctggctttggagaagcagtgggctgaaatggtggtgtctgacctgcggtgctggggccacaccctgtagggattgacccttgggtcctgcctcccggccaggaagtcctctccccttgccacttgccacccctctgcactagacctgggcctgacctttaccctccaaacttctaacaacacatcccagaaaggatctggttcaagatactaacaatcacacttggggagtgtatttcaaggaaaatagatggcatatcgtagaaattgcagacaaacctgaactcctggggagtcccttcagaaaggaagtttgctgcctggttgagacttgattgggaagggtttgccttgtatgacacccagtgcctagtgtagtgtggaatttaaggccagcaggtggtgattgatatgcacacttggtcttctctacaggccacatgtgttgaagattccctgccttactggggcctccctctcatgctctttcattctgtttaggcccagggaaaggattcctgcctgtggcgccgggcttgaggctgcagtactcaccatttttctatgatatgttgaagcaatcaactggtgttgagggatcttagaatttttaagacttgtatgaagtatccttccctttggaatcttgtttggagaatagcttaattagatgatgtcttagtccgtttaggctgctatagcaaaatacagtaaactgggtggcttataaacaatggagatttatttctcactgtttggaggctgggaagtccaagatcatgggcctgctttctgtttcatagacagcaccttcttactgtgtccccacagggtggagaaggcaaggcagctctctgggtcctcttgtataagggcaccaatcctatttatgagggctctgcccttatgacctggttacctcctagtggccacatctcctaataccatcaccgtgagggttaggatttcaacatatgaattttgaagggacacaaacgttccgtccatggcagatggtaaggctctgtcaccagaagaacatttgagtcagtcttcattcacgctgcccgagtattcttgcattacctgtgtgaactgaaccaggaagttgtcccctcacagggaatccatctctcttgcgccgttgcagctgctgcgaccaaatgctgtcatcgatgtttatcctggatgcccaccccgtccccagcgcaagattcttttcttagacccctgatgattttaatttgcattgtcttaaaacatcctgagatgattgaaacttgcctaaaatagtttacccagcaaatcacacatgtgttagcaggggctcatggcagccttttagaaatatagtagctctttagaggccagaattcttgcattcattcataaagccacatagacatctcccccgacctattgctggtgttattatggggttttatagaaatggagttttaagtatctgaaatgtactctcttcgttcttggaattttttctcacactcgagcatggtaacatcctttttcttctggggcatcaggatgatggctcccctactgtggtaccataggccccacgtggctctggggctccctgggcctctggtgcttcagtctctcccctggctgtcgtgggctcccgcttcttcttctgcagactgtgctgggcctcacgcagcatccggccctcctttttccttcagacagctcttgtttgcatttgtttatagtggttattgtaaaactatttcttaatgaggatttttttttttttttttttttgagatagagtcttgctctgttgcccaggctggagtgcagtggcacgatctcagctcactgcaagctctgcctcccgggttcatgccattctcctacctcagcctcctgagtagctaggactacaggctcctgccaccacgcccagctaatttttttttgtattttttttagtagagatggggtttcaccgtgttagccaggagaggatgttattaatgtaaacattgtgtttgcttacttttttcaatgttaattaaaatgatataatttcctcatgaatacagctttgttttacataagaattctaactgcacagaatcatatggggtggctcacgcctgtaatcccagcactttgggaggccaaggagggcagatcacaaggtcacgagattgaaaacatcctggccaatatggtgaaacctccatctctactaaaaatacaaaaattggctgggcatggtggcatgcgcctgtagtcccagctacttagcaagctgaggcaggagaattgcttgaacccaggaggcggaggttgcagtgagccgagatcgtgtcagtgccctccagcctggtgacagagagagactccatctcaaaaaaaaaaaaaaaagttgaaagtagttcttccaaaatgttccttccccaccccaccaaccctggattagtcaggggtctccagagaaatcgtgtgtgtgtgtgtgtgtgtgtgtgtgtgtgtgtgtataaacatatatgtagagaaggagagagatttgaggaactggcgtgtgcgattgtaggggctggcaagttcaaaacttttccatgaaaagttcaagatctgggtaagagttgcagtttgactctgaaggcagtgctgccggtcaagtttcttctttccagggtgtggggaggccagccttttttctcttaaagtcttcagctgattggatgaggcccactcacatgacggagggcatctactttcctcaaagtctgttgatttaaatatcagtctcatttaaagaataccttcacagaaatagctagaataatgtttgaccaaatacctaggtactactgtggcctagccaagttgatacatgaaattaaccatcacacacctcccattcatcttccttctgttcttaatattttggtgtggttcttctagatgccatctcactgtcttgcccaggctggtctcaaactcctggcctcaagtggtcttcccaccttggcctcctaaagtgctggaattatagacatgagccactgcacctggcctcatttaatttgttaatataataagtgatgttctggctgggtgccatggctcacacctgtaatcccaacactttgggaggctgaggtgggtggatcattcgaggtcaggagtttgagaccagcctggccaacatggtaaaaccctgtccctactaaaaatacaaaaattagccgggcttggtggcaggcacctgtagtcctagctactcgggagtctgaggcaggagaattgcttgaacccaggaggcagaggttgcagtgagccaagatcacaccactgcattccagcctgggcaacagagcaaaactccatctcaaaaaacaaaaaaagtgatgttcttaggtttctaaatgttatatcagccttcccaaggtggctgtcagcaggtgcctgctgcacattttgggaagttttaccttaggaagctggaggagtgtggtggggagaaggaggtgctattagtccagagcagaacccttcactggttgaggtgagaaggagggaagagtagggtggtcctgaaagagacctaattcaggagccagatacttccggaaccctgagagtgtctctcttgtatccacctagggaaggcattccttttaacctgagccctttaagtgcaggttggatatcagggttggcaaaggcagatgccatctgggaccttcctgaagagcaggttagcatattccaagctggaatatgctaaaagctttcaaaatacctattttctttaatccagaaatcctgcttctaacaatgtctcctgagaaaacgagaaacaaaatacacaaagccttagctctagggcttttcattgcaggttttactcatgagaaagaaagtgagaaacagatcatctgagtatccaagaatagggatttgttaaataatgacaattctaccccacatagaataggatagtctgtatctaccaggaattttgacacagagttacttttattgatgtgaagatattgctgatatagtcctaactaagacatatagcaaatggtcctgttttagtttgaagaaaaatgtgtgcatatgtgtgtgtctggtctataactttttttcttctctttaatttttggatctttttctgcaataaatatgaattacttgtgtaattatatgcaaaggaagatgttacattatgttcaatatgttttatttataagtcaggaaattgtagaatactagagcaatatctccatccaaagaagttaaaaatgatttttgggtgctccctggtgggatgacaagttttccggcacatttatgcgaaagcaggtgggtaggttagctgggagaatggaggtggtggtggcagcgaactcttagttcccaaagaggctgaaaacctcagtggcttttaagtagagcctgcctgcagcccactcttttctatttaaaattagattattgtgaaacatttcaccatatagatggaatgacctatttcaaagggtgcttaagctagattatattaaagaggctttaccatagtcaacagttattgagttgattatgctgtggtatggatgtcagtgttagaaaatcaatggtattctgtagaactttaaacatgtgaatatttgtgatttaatattcttctgtggggcaactaggagccttattgagataagtgggcagggctactcgagtcctcttgttgttccatgaaaaattatattcttactaaaaattggccgggtgtgttggctcacgcctgtaatcctagcactttgggagactgaggtgggtagatcacgaggtcaggagttcgagaccaccctgaccaacatgatgaaactctgtctgtactgaaaatacaaaattagccgggcgtggtggcacatgactgtaatcccagttacttgagagactgaagcaggagaatcgcttgaacccaggaggtggaggttgcaatgagctgaaatcgcaccattgcactctagcctgggcaacaagagtgaaactctgtctcaaaaaaaaaaaaaaaaaatctggtgaagattgggctgggccactgtggagttgctctcaatataaactttgtgcctctcatgcagtggtggtgtgactggcagtgccaagagtgacacttgattgcctggtcattagctcctgccctgggttgaattttagcatctcaccgtatctacgtctgtgaggcggtgagcctcacacctgagtctacgctgttttcctttgttacgaggtctcttcgtcaacttgggttgctgcaacaaagcaccatagactgggtacttattcagaatggaagtttattcctcacagttctagaagtccaagatcttttacagagtggaaatttatttctcacagttctggaggctggaagcccaggatcagggcgctagcatggtggggttctggcccgggccctcttccaggatgcagactgtagacttctctctgtgtccttacatggaggaaaaaggcacaagagagctcttgaggtcctttttataggacactaatcccattcatgaggactccaccctcgtgatctaatcaccccaccaaagccccacttcctgcgccattccactgggagctaggattttaacatttggtaatacttaattaatagatctacaaaatcaactatcagtgtatgtatccagcttggttctctctccatgactccacgctgctattcatctctacctgacgtcaccactgggttgtccagagacagtctcccacagtacactgaagtctgcgtgccatctgtccccacgcccgctctgtcccacatcctgtcgctctcatttgatggcaactgcatcctctcagctgctagggccgaaactctggggtcatcctggactctttttctattcaacctcacctccattctaacagcaaatcttcctttccagaatccaaattcgcctccccagctgctgcccccaccctggtgtgacaccatccttgcctgcctggccccacagtggtctcccatcagcccccttcctccaccccattcttctagagcctgtttcccacccagcagccagagtggatgcagatgattggcagccgatggctcaggacactccccctactcagggggtccccaggcccctgtccacggtctctgagacctcctgttgcctcctggacccgggttactcctcctcttctcactcactctgctctagccctgccggccaatgggctgctccctggatgcaccaggcacagtcctgagttggggcccttgcttgagctgtttcctctactggggcattttcccctctctgtgtccctgtggcccactgccttgcctctttcacacacggaccccaacatcacctctgccaagcccagcctgaccactctattccctagagagctgcacccgccctgcacacaccttttttaccccatcgccgtctgccgtgctctgtcgtttatttctctacgagccccatagttggtgtgtttccctccctggagaaagcacaccccaggagggctgagaccttagcagttcactgatgttttcacgtctaggccctcactcgagtcagtgctcaacacacatttgagaaggatcgagcggctggctcactctaaaccatctctgagaattgggactccaggtccctgtcattgccttgtccagccccctggagggtagtgggtgcccctcggggtccccagtgctgacccaccatgctccgactctgcccctctgacccgcttcccctcttcatttctagaccggccttattgtcgcctgctaccacggctttgtggataccgtggtggccttagcagagtgcccccacgttgacgtcaactggcaggacagcgaggggaacacagccctaatcacagctgcacaggcaggtaagagctggctttcccctttcctctcagagccgtggccagagcaccgccgccgggcagcccgggctcccgttgcgatgcagtcaggatggaaatgatcagagaccatgtcctgctaccaaggggtgccagggaagggctgattgctgtgaccacacgctatgcatttacccacttgttcagaattcagtatgggcagatcaagctccgatactgcccaaagtttttgaatatgaatctgtaccagaaagccacccttgtcaccgcttcacctgaagcctcacactccatcctgctcccgaagactgggggtggcacgaggctggcagacccaccagtggaagagacacaatcatgtgtctcagtgatagttaatcatgaaagtagacacgtgtagaaggtgactttgcacttcacctgtagagttaaagaaacgccaggaactgtttctgagagctgttagagtatccgtgtaacaagctgagatgaagtcagtgggagcatcttgtgagcgggtatccaagcatgtggccctcagcccatcagtcatcaagaagacagtgcttatgtcaatattgccaagtgcattgcgactctcctgctttggaactgtatccagacatttttttgaggacagacatgaaacctatgcttgcctcttcataatcacacttcatttggaacagtggtcttgaccaggtttatcactgacccctttcacatttctttgcctccaaagattctgtctgtttcatcggtcaagttctcagttgcaagcaaagaagctgcctgcagctgagccaggaagaacaggcgcttgtgtgttgaaggaaggaggggaagcttacacggttgtcgggttgttgagaatcccactcagggcctggaaactggaggaagtgcccccgaccacactgtatgttgattctggttgggaaatggctgttgctgtcaccaaaaggagacctccttgtcccttgttgcttcacaagctcctggaccaaagccaccctgggtggatctgatgggtggggggccagggaggctggaaaaccagtgtttgacagtttcatcccctgtggtgggagtggtctgggcaccctacttttcaatcaagacgaatagagtgggggaactcttcaaacttagaaagggccaggggctgtgctaacatgtgttcacctcctcaggtttcgaagcgtgaggcatcacttccatggagggttccaggctttgaaaacctagcaagagtgtgaaagggctttgtaaggcattcagtgattcgtttcctctcgtgggccagctgccatgtcagggaccaaggatacagaagtgcagggcagccccgtccttgagtaattctgcagctcatgggacagagaaacacacgaagcccagcaccatctgtctgccggagcttggtgctgtgggatgagaacactctatctagcctgaagttcatgataaggtcttgcaagaaggggatttgagctggggctgagagggagccgggcagttctcaggaatggcgagtcttagggacagtgtaggtgggcatggctgtaggatggcgtgtgtctaggagagatgagggaaggatggggaccagaccattaagggtctaagcccaatgcaagggaatgtatttcagtagcgtgaggctgcgtgagtggtgacaggggtgagaggatcccaggggcgtagcagagggctcagagcacagggaagggccgggagctgtgtggctagaaacacagttggcggtggtggtgatgcgggccatggaggagagctgggggtctaggatggctttgggctttgggacaggggataacaccaactgcaaagggcatataagtaaaagaagatgaatgggaggaacattggttttgagctggctatcatgactttgaaatgctctgagacctctaagtaaagaggtctccatggcaagtcaggaagagaaggagctccaaaatctggtccctgctagaaatacagatgagggacaggtgttgctggtgagagctgggacaaggattaggtcatgacaatatgagaatgtacgataagaggggatttcttttcttactgatctgccagagctctttgtgcgttagagataatagctgtgctttgatacccatgaggtgctttccagagtcttgcctgtttgcaggtgttttgattttatattcacccatgattgtttcttcagagtcaggagcacatcgtatatttttggcaagaatatggcattggccatgatatgtccttggtgtgtcctatcaggacacatactgccagtgtgtcctggtgtgggtgatgctaaatttgacgaactgcttacatttctccattttaaaggcagatatttcccctctgtaattagtaagtaatctgcaaggtgatacttagagattgtatgaatatcctgtttccccaccagtttttgccattgataatccttttctgaatcatttattttacacttattatctgatatttttctataaagaagagctttcctttagccccaccctttttttggtaccattactcattttttaaaaatctcgtgtgttctacttcaataacgcctttgttcttttcagtgctgaagttatcccaaacccagccagttggtaaccctgaagatggctccagtgtccttttgtcatatttctgtcagttttgagtattttcttgatttatggcacaccaaagtgttccacattctccctggactttcccagtccctgtctgtaaccagctgtatcttcaaggaatgatagttctttttttagtgaggaatggtatttagaaaccaaaatctggactctagctgtgctcattcacactaaatgttattgcttctaggcatttcagtgagcagagttagaaaaaaaaatatttaaaaaataaggatacctccaatccaaatgcaacaccatagtattcctcctcttcaccctttccatatgcttcccccattctttgtcggcaagaaacctggtttgcagcaatcacaatgcatttacccattttcctgtcctacgacaaatgtgcacaaagtggtgatactaaaggataattttcaaaagcttaaaaatttgactcttaggtggacagaaagtgaaaactcattaattagtgatgggctagtaattagttaaggccagttcaaaggaaatttgaagaacaggcacatagaggcaatcacaaatgctgaaatacatctgctaatagatgcaaaactggttaatatcctataaggcaatagaatataatgttgtgggttatcttttctataaggtgatgttatggactgaatgtttatgtcctccccctcaaattcatatgttaaaaccccaactcccaatgtgatgcattagaaggtggggatttggggaagtaattaagtttagatgagatcatgagagtagggccaccatgatgggattagtgtccttataagaagaggaagagaccagagctcgctccttccccaccatgtaaggacacagtgagaagacagctgcctgcaaacaggaggaggagcctccagaactgtgagaaataaatgtctattgtttaagccacctagtctatggtattttgtcatagcagcctgagctataacaggaagtaaattatatctctaccagatacaatgcaattgccttgctgtggacaatcagttttacagcttaacttctaaccttgtagagttgtggagcagcctaggaactgaatactgccagagggtcccctggacagcacccagaaccccacatccagcaccagcacttccctggagggaaaagagacccagtcacctcattagctcagtttccagctatgaacagtttttttttaaccaaagaatcagaaattagaataccaccactgctaccagcatcagacctaagtaaaagcccatatttctttgtggttgttttcttccaacatattctaccaaaagttattggtcttatagcaccatattcaaaaacgcggttaaatttttttaactttatgcagtctctccagatttcaaattgcttccctttccacaaatgcttatgtttttcactgagtcagtgacctattgaatttttctaagaatatggattgttaaaatttgaaaaatgttcttttgcttcttgcaataaaccaatttcattttttaaattgtttcctaggcactagacaaccggggagcaatcgatctatttcagatgaagatgctgccctgaaacctgtagcccagccccttctttttgaatctcactgtctttacagtgatccagggttgttttttgtttttgctttattttattttatttttttttttttctggcttgctcattcttctgcagggactgtgctcatccttctctggtttattttaagtcaaggatgacacaggtcctcttggagattggagggctctctggcaaaggaagaaggaaagggctccagctgatttccatccaggctcagtgcccagcagcctggggcgtggtgggaagaactcgggtccaggtgcaggccccgcagccactcccctcctgggctgtgtagttttacttccaagttgagtgtggcatgggagcctgtaacaaccaaggagcagcccccaccctttgcctggtgggacctcagggggaaggtggcctcgggagcttagtgccctccctggcctcatgtgcctggagtgttgaaaaatggcatcagtgggtctcaaagcgtccccatagaccacctctccttttctgcccttctatctgtggggcattgccggaattttgcagggttcactgaattaggtgtaataccccatcctcctcatcaacagaggcctgtccctgccatcttccttaaggaacagaaattgggtggtgtccctcgatggttctagtcacactcctggcttctctctgttgcctttggtcacagatggtgtcttcatctgcttaggctgtgataaaggaaataagcagctctctggggcctcttttgtgagggcactaatcccaccacgaggacccctccgtcaggacctaatcacctccgaaagccacctgctgtagtgtcatcctggaggcaggattttcgcacaggaatttcggaggacagaaacattcagactgtggcaggtgggaagctggataggagggaagattcctgtgttctcagctctcttgggagctggcccacccaggggtagccgtgctgccagacagagctggagtccaagtcaggtagcaggatcgggtggccggggtatgtaccagggtctgggctatcctgagggcagcatcacagctggaaacctgcctgggtggacaggaggaggcgggcagaggcctcagccattatcctgcttcctccacttggcctggctgatgttcttggaggctgattttaaaatacaatacacagtgtttggggggaaaatgaccccacatgagcaaggaaattagaggtgaatacctcttccacctcactgtcagccctctcttcagtctgctctctggagataactgttgttaatgatttgatgcctagatgggtttactctgccttttcaatttaaataaaatcattattataatgtattttttctttacttcttgttttctttcgttctttctttcttttctttttttttttttttttgagtctgagtcttgctctatcgcccaggctggggtgcagtggcacaatctcagctctctacaacctctgcttcccaggttcaagcgattctcttgcctcagcctcccgagtagctgagattataggcgccagtcaccgtgcccagctacttcttgtattttcagcagaggcggggtttcaccatgtaggccagactggttttgaactcctgacctcaagtgatccgcccaccttggcctcccaaagtgctggaattacaggcgtgagccgccgggcctggccttttttttcttttttactggcttttgttatcttcccctacttactgatttgcttgagctctctgtggccgccactgtgtgcacccaccctctggcctgggctctgatccctggacacccaacctaggctgctgcctgaggctttgggactgaattgttgaggttgcatacggaggcagaggggagagggactttacaccatttaaacaaacacagattaaaaagcttccttgtgtgtgtcttaattgcctcaatgtgccgaagagattttccctaatttctttctgaacctccaggggctgcccctgtccccatgggcatagtttccttagacactggctcccaatcttgcgcctccggcgtcagcatcacctgggctggctcatgtgagcattaacacagatctggtggaaacacagactgccaggccctgcccctggagtctttctttgaataggcctggggtggggcccaagaatgagcagatcaacaggtttcctggtgaggctgatgccactggcccagggaccccacattgaggatggagagctttgaagattttatgcctgatgacggcaaaggacccctctcagtgggcactgaagaccagcagagtcacagaccccacgagagatgttgtcagacagacacagaggcatcacggaattaaagtgaaaatgaggaaggcaggtgagcatgtgttcatgactttcctgtgctgttttgccaaagaggctgtttaggcccaatcaggtgatgtcccattttaatcaatttcataaccagttttatttctttgatgatttgttaatttcaaaagctgtccatgcatatttgcttacagccaaaaatgactacaaaagtattatcagggaggaagaaaaagatcccttctctgtcttccaaatattccagctcccttatcagcactcaggagtcacctcttcagacctcattcagtcctttccaaacacacacgtatgtatgtgcgctttgtattcacatgactgggctagtgctgttgagactgtgtttttagtggttttgttcacatggttattaatctagaagctcctgctgtgtcggtgtccctgagccctgccaggcgctcgtagccctgccttcctgcacggggatgtgtggctcatgcccggttccccaccaagacttcaaatttgagaggctgcgttatgactggccttcactcactgtggtggacccggctcttaggccagtccttgaacatgaagtacttgcttcttaaatatttgttggaaaagaggatattgtgtaaaatgcatgaaccgtggtatacttaactgtcccagttactggacaggtgggcttttgagttaatcaacggcagcaaggctgtagtgaagtctttggatctggggtgcatctctgaggacagcgtgttaggatcctggcagcttgaagcatgttgagtgacaggtggtctcagagggctgaacagaggagttgatgagggcctgtcaattacggggggaagggtagagttaagggaaccaacattgaaaggattaaggggagggactctgcagagagtgacccaggccaagaagctggaacccgagaggcagcctcggcctagaacccgagtgacacaggccaagaagctggaacccgagaggcagcctcggcctagaaccgcagccaggggccggagtgggaggcagggccagatgtcccgctccttccaccctggtcccctgctgagccaacccagaaacctcattggggcggaaactgggcaggtgctgttggtgcaggtcagcttcctaggccgaaagcagggcaaggaagaggagaagcaatgtgcagacacactcttagaacagaattgcttcagcaagggctgtgcctgttttaagtgtatgcagctgccaagtggtctttagaaagctgtggcgatttctcctttcccctgagtgtccaagagtgttcttgcaagccctggctgagatcagtcttttcagtatttccctactcaaatgaaccaaaactctggttttcagttgtatttccccagctctcttttgagcctagtacctgttaggatgcttttggcttcaaccacaaggacactgccttctcttgcaacacaagacatctgcgggcgatgttgcagggttgcttcactgagtagctgggtgatgctgggacctagagccacttctcagaaatacattcgccttttccttcatggtcccaaggtggccccagctgctagaagtgccacggcttcacgttgcaacactcagggacatcaaggaagaggagcaaatccctgtcggcgtttccctttataagacaggaaaacatttccagaaggctccagcagagtatcgttgccatctcaccaaccagggttgcgtcacaagcccgtgccaaaccagtgatggaggatggcttgtgtagacagcagtcgcactaagcagaatcagcattgtgaagcgcaatcttaaagcaaccatatgtttatattatttgctatggcaactgggttggttgtctgagagttggaagctctgggtttctggaggacacagcatttatgagtacgaattcggatgcaaatgccttcatctgccttttgagtgttctctaaaaagtctaatttcctcggctatttaatgcacaataaaaatacagccaaatctgtactaggtctgtaaatggagagaacgtttgaaaataaatccccatgtaatccctaagtctcatttagccagtcatttcaactttcaccaccgctccactaacaaaaataaaataagataaccaaagaaaggaacaagaagtcccatggatagagttgtgtgtttatttctgtttccttgttgtgctttaacagaatagcatggacgtggtaaagtgaggaaacgccaggggtctctttgagctggtgatgggatacagcacgtgaagcttgttttgggtataaggaacctctgatgtgtgcttgcaacttgttatttcttgcatttaattgtaaaattctgaggctacgtgctgagagccagcctggcaggatgctgcccggggacggggacagaacgggagggattctcaggggcagctgtgggtttgggctgcgggggagccctggttcctgagctgaatcggggagagtcccagttcagaggagaatttatgacttggtcagaacccaggaacaatgcctcttcatgttatttatcttattttattagcagtgcacacgatcacgatcttagtgtgatctcattgtgatgttcatgttgttttgaagtgcttccttttttctcagtttataccgtttcaaataagagagtagaacttggtgagtctcggtttcccagcgttgccttatcttttcctgtgagcttttctgagctcttctgattggccatggcagcgccacacccctgcccgctggccagccaggagggctcctcagccagcttggggcttgcctggctcctccttcagacccctgcctgccctgcaaagagcagggatgctgccctcccctactaaccctgcccctccatctgcatggtaaatgccttatgctaagaattcctggagtctgttcatgccgcgtggctggtatgatgtcatatttccaaagccgacagctccctctactggcctggtctggagaactgcagtttgagtgccttgagtcagtcaatcttagacaacccaattctgtaacattttccaatttttagagcagtttgtgtttattgcctgttttttttagatggagttttgctcttgttgcccaggctggagtgcaatgatgtgatcttggctcactgcaatctccgcctcccgggttcaagtgattctcctgcctcagcctcctgagtagctgggattacaggtgcctgccactacgcccagccaattttttgtatttttagtagagacggggtttcaccatgttggccaggctggtatcgaactcctgatctcaggtcatccacccacttcggcctcccaaagtgctgggattacaggcgtgaaccattgcgctcggccagcccagctaatttttattttttgagatgggatcttgccatgttgcccaggcttgtatctaactcctaagctcaagtgatcctctagcctcagcctccctggcctcttcgggccttggcctctctgctgggattacaggcacgagccaccttgcccaccctgatactttcaataaataaacttttcccaaaggagtggtaggaatgtttcagccttttcatctaatgcatatttattgagcaccccagagcatgcagtcagttggaagttttaagcatgtgagctgggtaacgagggctgtggcggctgtgggaacccatatatgcatgggaacgtggacgatgagacaccgtgggtcaaggggcaccagggaagacctggagttggaagggatggctcatcaggtcaccaagtaaaaagaggaggcagaatattccaggtagagggactccttgtgcagaggccactagattagaggaagtgtggctcatgagtgaattacacggaatgctggctgtttgaccataaagtggattgggagggcattggcggtgagagctgagggtgaagaggtaaaaaccagctcattgaagagttgagacctcatctaaagagcagagcccatggagagtttcggatgagtagtggggatggtcagaggcccctgttggtgtcaccgtgctgctggtgtggagaatgaatgggggcagaagtgggacaaaggaggctagtcaggacaggagctgtggccccatggggacgtggtagcccaggtcagggatggagaaacaaagacagttttaggaaatttaaacttttttttgtagagatgaggtcttgccatgctgcctatgctggtctcaaattcccgtgctcaagtgatgtcagaggtgcagttggcagaatgtggtgattgcttgggtgagggaggatgtggagggcttgagactgagtccagccgtctggcttgggtgatggggtgactggtggtgttcatcactgaataagggatgtgggagaggagtagcttcggaggaaagatgttttgggtttgatgcattgagtttgtaggatacccatgatgaaatactcagtagacagatactcaggtaaaaaactgaagaaaagagatagaactggaaagagttgatgtggaagctttagagctgaaacttggatccacaggagtgtataggatcaccaaaggagagtgtatgagataaggagggggcttagcaggcagctgaggaacagcagcatttcaggaaggagagaacaggagctcagaatgttgagagggcggaaaatcagaagggtgagcatctgcatgtccatggaaagagcgtgtttcagaaaggatgaaagagaggagtgagtgggaaatgctggggagatgttgaatgtgatgagaactgacaaatcaccactgagtctcattgtaagaaggtcactggggactgctgggggtggtttcagcaaagtcagagagtgtcattagcaacagtgagagtagatggatctggaattggactgaagcggagttgaatggttgatggagggtggcgggaacatgaagacggcccacaggggttgctgtgagtcacatatgcttttaagatgagagacccttgagcatgcatgtcagctagttattgctgtgtaacaaacaactcccatgctctgggatgtttttattgcttatgcatctgtggatgggctggggatctgttgatctaaactgtccttgctcaagtctgtgggcaagtcggggacctgttcttgggcacttcggctggggcagctctgctgcatgcattactcatcctcttcctgggagcagcgagccagcctgggcatgctcttcttggggagacagctgaggcacaaacatgcatgaaagtctggataagtacatttcaaccttctgcttccatcacgcctgcaaacatcccatcggccaaggttccactagacagagaactgggaagtcacttaacaaagggcagtgtgaagaagatgggccattagtgcattgtaggaactaagggccttctgaaggttcactaaaatcaacttgcaaaaggcaggtgaataagagaagaggcatacaaaagaggccatgttcccataacatgcgtacatgggagccttcggaatgaaaacccaaaaatgcaggaggaattttccatttttctgcttaggttcaacaaagtgtggacagttatgtagaaatatagttggacaggccaggcacggtggctcatgcctagaatcccagcactttgggaggctgaggcaggagaatggcttgaacccaggaggctgaggttgcagtgagccaaggtcgcgccactgcactccagcctaggtgacagagtgagactgtgtcaaaaaaaaaaaaaaaagaagaagaaatataatgctaataaatagactgagtggggaaaccccacaggcctgcctgtctcctcgattcttctaggtttctctgagcagcacttcttccttctgggagtgactctccctggaacaggggtcttatgacctacagtcggacatggcaagtcagataatttctttatgttagggcagtatttttaggttttagggaacctttaggctggccttagggaaaaggggttctggtttcaaagatctgccttggggaagagggattccagtttggatggctggcctcagggaagaagggactgagacatgggagggcaggagggcagagagaaacctttgcttctgaggccttcactgtggggtattgctttctgagccccaacagcattctgagggaagtgggtctgcaaggaatgagaggttgatgagaaacaggagggatctgataaatattccacagcagtgggcagggagtggctgtcaagcacaggaggggaggagcagggataagcctccttcagcaagaggagaatcccctgcgttttcaataggaaaagtgaactgaggattgacgaggttcataaacttggaaagaagagctttcttctcataaagggttgcagcctgcagggtggctattgtggcagggaagcagcgcctctggccagaagccagaaacagacccttccaggggcagaagaacaagacagaagaacaatgcatgctgaaggaggtggctcaatacacatattccataagctatgggagaagcattgaatatcgatgagaggagaaacacgcaagtgtgcaatcgagctccgtgcctctccctgggacctgtgttcaaaaagcaacagcgttagcatgatctgagggtggagttttcaggccctgacctcaaaaggtgaagcagaggacatgaaaaccctcactgcgcgtcctctgtggacctgccggacgcactccaaagccatggccagtgtctctcatgaggacggaatgctggtcggttgtttcatccaaattgcagaacggcggggcagcatcaggcggttggtttatatcagtggaggagtctttagaacgggctggtttctgtttagacttaggaaagaaagcctcacggttagcaaggaatgggtataacgaggcgcattgcccttccatcctgtcatagccaggactcagttttcaagggttctctggggtccccttgggcaggagggggtcggttcagtccgttggatggctcaggatttcacttttccttctcggaggcccgtgaatgtgggcagcgtggggggcgatgggggaaagccgagggacttcccttctggtggtttctgttccctctatgaacttgaagatgagtcatccaggagaggggtttgcgtgaggtcggtgacttccatgtgaaaaatttaacattttccccatggggcctggggaagagtcaaccgggaagcacaggagcactgctggggcaggctgagaagccggtcgggcccgggtggcgtgggtgtccacctctttgtgtcccccaacgaaggcaccttcgcatccatgcagagcggaaccaggggtgtggcggggccaggcgtcatttccagctttcctcttttgcataccacagacctgtccatccactcatttaggagctctctgaatcaagcactcctctccctcctcctgcccggggttgggggctgggctccatctctgcctcctgaatgctcccgtggcttcctggtgagctccccaccactgggagagcctcaggtccagggtggagaggccccacaccaggccgcacagccagctgtgaatcatggtcctgaccttgcactctttttgaacggctctatgctagtttccccttttttatttttatttttatttatgtatttattttgagacagtgtcttgctctgttgcccaggctggagtacagtggcatgatctctgctcactgcaacctcctcctcctggtttcaagtgattctcctgcctcagcctcccgagtagctgggattacaggcacccgccaccactcccagctaatttttctatttttagtagagatggggtttccccatgttggccaggctggtcttgaactcctgacctcaggtgatccacccccctcagcctcccaaagtgctaggattacaggcgtgagccaccatgcccagccagttctcctctttttttttttttttttctttttgagatggggtcttgctctgtcaccaggctggagtgcagtgatgcaatcttggctcaccgcaacctccacctcctgggttcaagcaattctcctgcctcagcctccggagtaactgggactacaggtgcacgccaccacgcccagctaatttttatatttttagtagagatggggtttcaccatgttggccaggacggtgtgatctcttggccacgtgatccacccgcctcggcctcccagagtgctgggattacaggcgtgcgccactgcgccaagcctatctcctctttttttaaaataaacttttgatttgagaatagtttatgtttacagagaaaccacaaacactgtacagagaatgcctgtgtgcctcacactggttccctctgttgttaagatctgacgtccgtgacgcgctgaacacaatgaatggacgcgtgtcaattcaccattattaactgaagtccgttctttattcggatttcctcagcgtttcccggatttcctttttctgttgcaggatcgcatgtggcatttagcactcatggctcctcaggctcctcttggctgtgagcttctcagacttctcttgtttttcatgacctcgacagttttgaggaggactggtcaggtacattgcagaatgttccttaatttggacgtgcctgatgcttttcttgtgatgagactggagttatgagtttttggaggaagacgcccgataaagggctgatgggccttggtcacctggctgaggtcatgttagcagatttctccactgtgaggttctctccctcctcccccgtttccgtgtaatagtctttcacaggaagtcagtgcacgcagcccgcgggttaaggaggggggaacacgttctagccccttgagagtggagtgcctgcctggattattcagaatttttcttccagatttttctattctgctgggcaccttttacacacagattgtctcctataattttcacaaatgggaggttgatattatccctcattttacagatatggaaaagctgacttccaaaagacacccggattctgagtggcaggcctgggccttgaacctggctgttctcagagccagctctcttcagtactgagctcattgtctacactatgttccagtgacgcgatttcattcaaattcacttcctccctgggtcacttgtgaccctctcttaagcagggtagggcttattggtggagagggggtgttctggggttctctaggtgaacctaccctttaaaagggcttctctgaggatttcaggaaccaagtccgattccataatgtccaagttggactgggctcaaactagatttttttcttttttttttttgagacagggtctcactctgtcgtccaggctggagttcagtggtgtgatcttagctcactgcaacctccacctcctgggttcaagcaatgctcctgcctcaacctcctgagtagctgagaatataggcatgcaccagcacacccagctaatttttgtatttttagtagagacaggcactatgttgcccaggccggtcttgaactcctggcctcaagtgatctgcctgccttggcctcccaaagtgctgggattacaggagtgagccactgcacctggcctcaaactagatttcaatatggcgtgtgtttgggttcccttgtgcaaggaaggctgtgtgtctcatatatgtaaagaaaaggaaagctccttttggttactcatcatggtttttaaagaagaaaggttaatacttatacattcttagaagtattgggtccacctttgatttccattgaatggggtcatctgtgtgatgagaggtattattctgccatcctgggaaaacccgtgggaagcagggcgtgatttcttggatcatcgaaagctcaggcctgtagtcagaacaagttgactgcatgttggtttttctggactcaacataatacgcagaacagatctatataatgggtggtttgctctgtggactttgagtttttcctctttccacctgttcaaagtgctgaggatatatcagtgcaaaggaacatcctgcagaagattgtgacggacacgctatttcacagtttaaagaaatggctccaaaggaattgcaattcattttactatgcccctggttaaatctaactgacaggtgccgccaagcatttaactggaccataaaccaaactgagatcaaaggattcccccaccttcccataccacccagttgagagtaattcagcagctctgggtacctgacagctggccttagcccctccccgcacatagtaaaggacgagggagagcaatgtggtgtaaatgagtcaaaaaagcaccagcgactggctgtgagtcacgcagcgaggggatcgtaccctttgtttcctgcttataacctgaacactgttagactcatcagggcttccttttcaaaaagatacatggttccccttttcacatttgtggagagctcaggagatgggctgaggtcaatggcgagcttgctcctcaggagagttcacccctgattttggttgcctgttccttcttcttttggattgatgaagagcaaacccacaggatttcatactggtgaggcagcagcctggagtggccctcaaaggaggaaactgggttccaaccccggcagtactatccctcagggtgtggctggggagacagaagccacttgatatatcggagggtttcatattggatttgctgaactgaaggggctaggggagcagaggccaagggcgcccagccctgcctactggagatctcagccgcagcggggaatcctggaggctgctgcagcgtcatgctcacgtagtattctgtctgcagaggtgggctgggctggggaggcacctcaggtctcatgcctgcccgaccccagagtgatgtccttgccacctctctcccatcccaaatctcaggcagtgccacccattggaagtttctgtgcaaaccagatgcctgtggagattctgggcccagggcccggcttctccatgattcaggtgttcctggggggagggaggtgatgccaagttaaggagagagtgcatagaaatgtccacgaggcccctgcagctgcgacagtgggggctgaaaggaacatgcttgagttggaatgaataagtggggatttctgagcactgcgtcatcggtgcataagaatggggactgtggccagacacagtggctcacacctggaatcccagcactttgggaggctgaggcaggagaactgcttgaatgcaggagtttgagaccagcctcggcaacgttgggagatcccatctctacaaaaaaaaattttttttaattagctgggcatgatgatgctcgcctgtgagcccagctacttgggaggctgaggagggaggatctcttgagcccaggaggtccacactacagtgagctatgatcgtgctcctgcactccagtgtgagtgacaaagagagactccatctcttaaataaacaaaaaggatgggaactgggtacccagcacctcccctggggttcaggaggagagactcgggcagattgctcatattcccaagagtttcagacctcatcagcaggggcctggatggaggtggcagctcaggggagggtgcagcagagggagagaggaaggaagctctttccaccaggtgtggttggtcacgaaggagtgaagtctgagcttcggggacagtggttctcacctggggtgttcttgccccaccgatggcggtttggtggtgtctggacacagttttggttgtcacaacctatgcgggagtgggggtggttgctactggcatctatcgggtagagaccagggatctgcctagtgtcctgcagtgcacagggcagtccccacaaccaagagtcatgcggccccctgtgccgactgtgccaaggctgggacggaccctgctccaggacactgaagtgggggagggggagatgtattcacacaaggacttatgagctagccggcatcaggtggcatggacagttgacccaagaggatgctctcccactccattttggttttccatgggagaatcctggaaacagcactgttgctgtgacattctccttattcaccattaactgagagcaccatgggcgtgcctgggaatgagcagaaagttagatcctttttggaggtgcaaggtgagaaaggggagaaatctgtgttctctgagacatctccttacctgctttgctttatagctgagggccttgcctgcgacactctgtgggatgtgtgtgggcgtaggtagttagacacacacacacacacacacacacacacacacacacacggcggcggggggaggggtggtggtgggtaagggtggagagagagactcctgcttctgggtgggaacagggtgccagcgtgaattggcactgtcctattgctatgatgatgactttttcctccctgcagctctggagcacttggaagcggttctgaagctcatttgcagctttgcatctgtttgcacgggcgtctcctgctgggagttgaggcttcctgccctcattggctgtctgaggctgcgctccctacctgcccgcagcgtccctgccccccacatccacccccagtagtgtaatgggacagctcctccctcgagtgctttgccgaaggggacctgcaagaacccaaaacagcagcgctgcagccagggcggtgccttctcctttcctctgtttcctgggctccaggagaattctgtcttggggtccgagaaaaactcacacagcagaccggctggcccagggctgactcagtgtttctttctctctctaggaaggcctggctggaaccagcacattttgtggaagtgggaaccaatacacgtgtacacttctctttacagggcacgctatcatcactaactacttgttgaactatttccctggtcttgaccttgaaaggaggaacgcgttcgggttcaccgccctgatgaaagccgccatgcagggtcgaacggactgcatccgagccctgatgctagcaggtatgtccacctgtcctgtgcagcttccaggggccctgggacaccagagttgctcctttatggaatatgttttgagattaatcactcccatagaaacaatgcctagttgctgcaataaataatagtttcttcactgacatatacttctgtaactatctgaggttttaaaaaagccacagcattggttcccttcaggacacccctttctgctccctgctgagctttgcagtgggtggcaccttccctcacctgctgttttcctcctgcccacccgttctacaccccaagtcctgtccatatctgttcctcctcagaaaggggtgatcccttggctgtaaatggcaagactgtgctgttgaaggtgggcgtagggatggtgggaacggcccaggccatcctaggtcactgcttgctggtgggtggcattgcatagtaacgttaggaggtgatgtggagttgcatgttaatgttgggatgtgatgtggagttgcatggtaacgttgggaggtgacgtggagttgcatggtgacgttaggaggtgacgtgttgcatggtaacgttagaaggcgatgtggagttgcttgttaacgttaggaggcgacatgttgcacggtagcattaggaagtaacatggagttgcagggtaatgttaggaggtgatccggagttacatggtaacattaagaggcaatgtggagttgcatggtaatgttagcgggtgacgtggagttgtgtggtaatgttagcgggtgacgcggagttgcgcggcgatattagcgggtgacgcggagttgcacggcgatgttagcgggtgacgcggagttgcgcggcgatgttaggcggtgacgcggagttgcgcggcgatgttagcgggtgacgcggagttgcgcggcgatgttagcgggtgacgcggagttgcgcggcgatgttaggcggtgacgcggagttgcgcggcgatgttagcgggtgacgcggagttgcgcggcgatgttagcgggtgacgcggcgttgcgcggcgatgttaggcggtgacgtggagttgcgcggcgatgttagcgggtgacgtggggttgcgcggcgatgttaggcggtgacgtggagttgcgcggcgatgttagcgggtgacgcggagttgcgcggcgatgttagcgggtgacgtggggttgcgcggcgatgttaggcggtgacgcggagttgcgcggcgatgttagcgggtgacgcggagttgcgcggcgatgttagcgggtgacgcggggttgcgcggcgatgttaggcggtgacgcggagttgcgcggcgatgttagcgggtgacgcggagttgcgcggcgatgttagcgggtgacgcggcgttgcgcggcgatgttaggcggtgacgtggagttgcgcggcgatgttaggcggtgacgtggagttgcgcggcgatgttagcgggtgacgcggagttgcgcggcgatgttagcgggtgacgcggagttgcgcggcgatgttagcgggtgacgtggggttgcgcggcgatgttaggcggtgacgcggagttgcgcggcgatgttagcgggtgacgcggagttgcgcggcgatgttagcgggtgacgtggggttgcgcggcgatgttaggcggtgacgcggagttgcgcggcgatgttagcgggtgacgcggagttgcgcggcgatgttagcgggtgacgcggcgttgcgcggcgatgttaggcggtgacgtggagttgtgcggcgatgttagcgggtgacgtggggttgcgcggcgatgttaggcggtgacgtggagttgcgcggtgatgttagcgggtgacgcggagttgcgcggcgatgttagcgggtgacgtggagttgcgcggcgatgttagcgggtgacgtggagttgcacggtgatgttaggcggtgacgtggagttgcgtggtaatgttagcgggtgacgtggagttgcgcggtgatgttagcgggtgacgtggagttgtgtggtgatgttagcgggtgatgtggagttgcgtggtaatgttaggaggcaacgtggtattgcatggtgatgtgtgtggcaatttccgttttctatgctgtgtcatagagtggaaaattctcaggctatcaacctggatcaacccctctttgtcttttgcgccatcttggagaacgcactttcctgttcccatctgtgaaatgggagtaatgacctctttctccctcacctccctgaggctaaaatgcaacaatactttatacactcctagaggctatccagcttcaatgagctactaagctaaatgccacacaactaatagctttaactcttttcttcactctgaaatagaatcaatgatcatccttcgtgcaacctcatcgggttattttgagaattaaatgagaaaatatgtgtcaagcacatgtcgtgttagattcagttagcagctgacatctcagtgaatgtgcgatgctgctttcaccattacttaattctgttattttaatttctctttatttttgttcttggcactgggttcagccagtcctgcttggcgctgcaagttcctgaagaagtggatttcctctctgtcttagttgttctgctgctataacaaaatacctcacctgtgtaatttgtaactgtagaaatttattgctcacacttggggaggctgagaagtccaagatcaaggtgccggcaggttcgatgtctgctgatgccccttccttcttactgtctcctctcatggcagaggggacaccgaggtaccctcaaaccctctttcataaggcactagtttgattcaggagggcacagccctcatgatctaatcaccccctaaaggcctcacctcttaatactattccagtgggtctgaagttccagcataggaattttggagggtcgtcaacattcagaccacagcaccacccctgtcttggttatcctgagggtggcatcagagttttcccaggcatcagtgcttccattaatgtcacttttctgttccaggacccctgctgggctcccacatttagttgtcttcttcttagttgtccccagtcttcttcttcttcttctttttttttttttttttttttttgagacagtctcactctgtcgcccaggctggagtgcggtggtgcaatctcggctcactgcaacctccacctcccgggttcaagcgattctcctgcctcagcctcccgagtagctgggattacaggcacctgccaccacgcacagctaatttttgtatttttagtagagacggtgtttcaccatgttggccaggttggtcttgaactcctgacatcccgtgatctgcccgccttagcctcccaaagttctgggattataggtgtgagccaccgcgccctgcccctcatcttcttgggtctgtgaagtttctgtcataacctgttgcccatgacgggacagtcttgattccaaccagtgtgcagcaccgcccagtctgagcccgtctgttgtttttctcgagatcaatctggagttacaggattcacaattgcttcagatttatctttctttttgctttaaccttaggggattctttagtcttaggagatgctataataaaaataagttcagtgaatgagaatagaggcttcaaagatgaaaactttcttggaaataaaaaaaaaaacataattaaaaacgagtcctatcgattgtacttttgattcagagatgatagttttattttaaaaaaacgagatatcagtttcaacagagtttcggccctgcctgccctcatcaatgagaaatggttcctactaattaaatggtaattatgtgatgcttttgtgtttggcgggagcttcagacacttttactatttctggatctagttataattgggcgtagatgtttggtaattgactttttcaactgaacatttatgatgtcagtcacatcactgcactttcccattgaattaatttgaactgcaaaccttttttaggtcagttgccctctaatcgctccgtttgactgccgtgctttcttccctgggtctcctgggggtttcaggcatgtgtgacagcatttagaggattccagaaacaccttgcacatctcttggaacgatgagtctgcgggcagtgggtttactgctgacattgctcttcccccatcagttatttggatacaaatttgacattagatttgagactctccctcccctattctccactttgcaagcccatcccccatcacagtctagaacaatccacggattattgtctgtgggatcctctagtgagtctctccctgtcctatacgaggtacagagcaggagctgaacagaaacagtccaggaaccaggacccagtttcaaattcatcttctccacttcccatctctacacctgcagcctgtcactcacctctctgggccccagtttcctcttctataaaatgaggctaatgatagcacccaccgcaggaaggtgggatgcggattgggcacgttcacaacagaacagccctcgggtgcatgctgggcttggagaagccttcggacatgttggttgtgattattgttattattatgattattggtgagtttatgtgttcaatagttatctgttaagtgaatgaaaaaatacggtttgtttttccctttgagaaatatcttgtaaatgagatacttaaactttcttaatgagggtagtaagcccctacctcagggtttttgttttttgcttttttgttctgtttttgtttgtttgttttgctttgttttgttttgttttgagacggagtctcactctgtcgcccagagtggagtgcagtggcgcgatctcggttcactgcaatctctgcctcctgggttcaagcaattctcttgcttcagcctcctgagtagctaggactacaggcatgcaccaccacatccagctaatgtttgtatttttaggagagacagggtttctccatattggccaggctggtctcaaactcctgaccttgtgatctgcatgcctcgtcctcccaaagtgctgggattacaggtgtgagccaccgcacctggccaggggtttcttaatttcagcactactaacatgcagagccagataattctttgttgtgggggctgtctttcaaattgtaggatttttagtggcatccctggcctctacccacaagatgactgtagcacctcttcagttgtgacaaccaaaaatgtctctagatgttgctcaaagtctcccaggttgggggaaaaattgcttcccatcgagaaccactgatataaataatttaaatgggaaaggatatacaaagtgagaagagacattttcccctctgtgtactcttcctcgcttgttctgtattcctccctcaaataaaagtgtgacatcttggccgggcatggtggcccacgtctgtaatctcagcactgtgggaggctgaggcgggtggatcacctgaggacaggagttcgagaccagcctggccaacatggtgaaatcccgcctctactgaaaatacaaaaaaaatttagccgggcatggtagcacaagcctgtaatcccagccactcgggaggctgaggcaagagaatcgcttgaacctaggaggcggaggttgcagtgagccgatatcatgccactgtattccagcctaggcaacagagtgagactctgtctcaaaaaaaaaaaaaaaaaaaaaagagaagtgacatcttgtttagggaacttttgagctgccctcttaagctttggttgtagtgtagaacttacggaatattttcatcttctactattactactaagcttacagttctcccaagaaaagtgggttttattttcctttgacagtagatgggtaagaattaaaaaaaaaaaaaaaagtgttgaattgcttccccaggattagtggagagcaataaggacagatgttgatatatttctaaaattcacacaaatattttaagtcttattctttccatttaaatacgtgatattaagaaaaaaataaaccatttaaagaaactaatagccagagcctttcttttagattgacacttcagattgtaataaaaagtataaccgggttctgagaggctgatcgattgcatctttggtttggcttcgtaaggagtaatgcaggctctgctgaagagcatcacaagggagttgcagaaccttgttaattcactgaaatattaatgcccacagtgacaggtctatttaaataggtggctctgagaagcgtatcgaggatgtgatttttttctgaagagaggcagaatctgtggaggttgccaggttccaggcttgcttaagggagctcactttcagacctgaagtgtggtgtaactgccgcagccttcaggaagcaaaaacaagcagcaataacctcaaatcttcctgtgattccaaggcgcaaagtggatttaaaggacggcgaggaacagagatcagagatgctcccgctgtgggtcagagggttgctcttgtctcagggaagccctgatatctctttctggaaagtcagatgatttccaaccatatagaggtttctttctgtttataaggaaaacttaaatttcctatgaagtgtgaatttgccatgtagaattgtttgaagtcattagccagagaaaggatgaaaagtcaagcattctgtgtcacctgcaaagcaaacctcgagacaaggacttgggggcaagtagttttgagggatggtggccccaggaagtggagtgagggggcagcaagtgagattgggaagaatggaagctaagaaatgtccaccaatgagcaggttcctcttgtgggcagctgggactcagaccccctggaccctccactatgaggaaaagatatcgcagagatgctgggaagtttatttcccaactccagtgcctctttgaggggagatgagaactttgagcacacttcccacctgctatgtggtgggggtggcttgtcctccctgctgggctggagcacaagctctttcttggaccctgcatccagatttgtcatcccgattatacccacaatgcccaagatacaggctggaggtggcacaaggggaggcagtgagggctggtccacagtggtctcctgtggccaggaaaggccccctggcaagagggagacctgagctagggtttgtagagtggataacatgggggtgggtgggggctggtggagaagcaggaaaggaagtgacacattcagggcttcacgctccacccacctcctgctagtcctgggcctggccatggctcccagagaaagccttcttgagaatgagtgatggaaagtatagatttttttttcccattagcacctgtttggaatgtttttggctgcaagtaacagaaatcctgactagacagtggcttaaagaaaacaggccgcatttctcagctccctggaagtctgaggttggcagtcaccctccagagctggccctggattccatgaggacaacagtggtttcctcctgtccatttggctccccttagcctgttgatctgtcaccccttgattccacgagaatcacccaatatgtgtttcagacaggaagctgcagcagcaccaaccatgctggtccctttcgtcaggaggcagaaccctctttagggctcagtcaccagtgctgggttgcttggctacttttagctgtaagggaggctggaagaatggggaacaggattgcagccgttagattccaatagtgattctcagctggaggtaatgttgccccaggggacatttggccacgtctgtagacatttttggttgtcagaactggcggactgctactggcatctagaagaaggtagagatcagggatgccgttaaatgttctccaatgcacaggacagcccacaccaaataattacctggcctaatatgtcaacagtgctgaggttcagaagtcctgggttagactgatcgtgatgcattgccaagaactgaggatgttgctgcctcaagtgaaatagaggattttgtgtagacttagagcactcaacaaggcagcgagtggacccatgggtggcagctccacttttgtccacatgattgagccctgggcaaaacaacactgggtgggagatgacgatgctggggggtctgctggcgagaagatggatacagtggcatttcagaaatcctctgtattctctggaaggtatttgtataaaatgttaataatcggtacttatcttttataatttaattgctgtgttcatgtcattaatataaccctttacagttgcttcctaaggcagcagatccctaatttatagcatgactctgattctagggctcagtggcctttgttccttagaatgtttgtattttctgagatcattttgaaaagataggtgaacatcaggacgaagagtgcaaaactttggacagatcttcctctggttttccattagcatttgaaaaatgtctctttcaggcagtgttcattaagattttaattttatagtttgttccttttttaagtgacatgcaattaattaaggtttaatgtgtcatctattttttgcaatgacacttttactgcccccttttcattttagtcagtttataaattgtactctagctaatgagttccatcctgatatccagttccaaataattaccactcttctaatatggctattctttaatgtgtcacagaactaagatccttaccaggcaagctcaggtgagctgggtctgccagagccatgaggccactgtgggccaacaggccagggcagtggctggggacccgaccttcctcagttcagcacacgttgatcagccatcacatgtcagactcctgggtctgcatgggatataaatgaagaagcgtctgtcgggtccggtcccctttgagctcacagactagataattgccctagttctccatgttgctttgctggtggagatatgactaatgggacttgaaatcctcaatgatttttttttttttgaaatggagtctttctctgttaatcaggctggagtgcggtggtgcgatctcggctcactgcaacctctgcctcccgggttgaagcgattctcctgcctcagcctcctgagtagttgggattacaggtgcctgccaccacgcccagctaattttttgtgtgtttttagtagaggtggggtttcaccatgtattggccaggttggtcccaaacccctgacgtcaggagatctgccctcctcggcctccaaagtgctaggattacaggtgtgagccactatgcctggcccctcaatgatttttaacagtatgtgggactgagattggaccaagattaattgaacagcaattccgtattaatttctatactacaacattgaaatttatgcagatttcatcaagttgagttgaagtttaactttgcaatatttgggggcagtgggtggactggggagatttattaagggagtgactagtgtcagggagactgtgtaaggggacctatcagtcaaccaataggatgtggatatcaagagatttattttaaggaattggctgtgtggtttggggggttggtgagtctgaaactggtgcggtaggctcgaaggctggaaactcaggcagcagtaagtagatgccgcagtcttgaggtggaatttctttgtttccaggaaaccttggtctttgctcttaatgccctcaactaattgggcgaggcccacccgcattatgaagggtaatctccttgacttagagtcaactgattatagatgttaaccacagctgcaaaatacctttggggcaacacttagatccatgtttgattaaatcactgggtattctagcctagccaagttgacatagaaaactaaaactgaccatcacaccaggactgccaggtggtaggaagtacattagactgaggttaggacacccaagtcttagaccctctctctgttactagcccacagccactgtgactgccattctttttgcaacaagccttttaaaaattcatgccccctacccaccaggatgaaacgtgttgagcaaacaaaaatgaatttttctatcctggaaaagcccaccatcggttaaaggtagacagaccccagccagctaggccgcagtgggagaagcgaaggaaccacccatttcccacagtccaggacccatggcagtcctcaagagtgagaccacagctggggtgccaccactttgcaagtgactgttactggtcatatttttagaactttctagccacagcattcaagtatgcaaggcagctttgttgtctggtcatctctccattgatggaaagctataggatcttatttctttaaaaaattctgtaatttggccaggcgcagtggctcacgcctgtaatcccagcactttgggaggccgaggcgggtggatcacctgaggttgggagttcgagactagcctgaccaacatggagaaaccccctctctactaaaaatacaaaattagcctggcgtggtagcacatgcctgtaatcccagctactcgggaggctgaggcaggagagtcgcttgaacccgggaggcagaggttgcggtgaacggagattgtgccattgcactccagcctgggcaacaagagtgaaattctgtctcgaaaaaaaaaattctgtaatttaggtgctgaattcaggcggggttttattcaggacagataatcaatggagcacttaaaaggcaggttgggctgggcacggtggctcacgcccgtaatcccagcactttggaaggcggaggtgggaggattgcttgaacccagcagttcgaaaccagcctgggccacatagccaggccccatctctacagaaaattacctgggcggtggtgtagccccagctactcgggaggctgacttggggggatggcttgagccccggaagtcgaggctacagtaggacgtgttcccgccactgcactccaggcccgccttccggcgctcagatgagcacagggttcgcagagtgaactaggtgcagtctgttaggaggcttggggccaggggtggggggtgggggcagttttgcctttgccccaggctctgcctgggagggaagagtccttgttgccgccacccacttctgtttgtgttttgcgttttgcaggggcggatgtccacgcgagggacccccgccgtgggatgtcgccgcaggagtgggccacttacacgggccgcgtggatgccgtccgtctcatgcagaggctgctggagcgcccctgcccggagcagttctgggagaagtaccggcccgagctgccgccgccccctgaagcggcgcggaagcccgcgggctccaagaactgcctgcagaggctcacagactgcgtgctgtccgtgctgacgccgcgctccgtgcggggcccggaggacgggggcgtcctggaccacatggtccggatgaccacgagcctctacagccccgccgtggccatcgtgtgccagaccgtgtgccctgagagccctccgagcgtggggaagaggcggctggcggtgcaggagatcctggcggcgcgggctgcacggggcccccaggcgcaggaggaggatgaggtggggggcgcggggcagcgcgggcggaccggacaggaggacgcggactcccgggagggctccccgagagccggcctccctcccgccctggggtcccggggccccgcagcgcccgccccgcggaaggccagcctcctgcccctgcagcgcctgcggcggagaagcgtgcggcccggtgtggtggtgccccgggtccgagtcagcaaggcgcccgcgcccaccttccagcccgagcggccggcgcggaagggcagcaccaaggacagcggccacctgcagatccccaagtggcggtacaaggaggccaaggaggagaagaggaaggcagaggaggccgaaaagaagcgccaggccgaggcgcagaaggagaggcgcactgcgccctggaagaagaggacgtgagggcccgtgtgcctggcgctggggccggggctggggccggggcggggccgcagggctgggcgcggagaaggaggcggccccgttgcgcatcgcaccacttccgctccatggaccacggggctgcgcgcatttccaggctgtttgtccaggctgcttccaagagagggctgagggagccacatggattcgcttgtcgccagccctcctagcaatcagtacacctagcgggcacgttgcctaaaaggctccctttagagaacctcaattaagattttttttaaagatcaatttatcaaagggcgttttctccgtaattttgtatttttaatcattatttatcaaatttgcaacgttttacaagtgatagggccccttatatccaaggcagttttaatacacttgcctgaagaccttttgtttaagatactgtttctagcaataagtatccatgatacctgtatgagttcacacagacatcatgggattctcccctttttggctgtttggtcttttctcctcatcgtgggtgtaggtgcacactggatgttcttagtcattagattaagtgttgccggatatttctatttgacggaggcattggctcgttgagccacatgatcaagtgagacagaggatcagatgttactgtatctttttaaaactcttatccatatagtaatatattgaggaaaaacatattgtcaaattataaaacaatggagcgataaacatgtatttattgctagaattaaactcattttaagcaaggggttttaggtaaactggatacgaaatctttaacattaaaaatagatatgagaaaaaaactgtcattcgataaaatgaggcaaatttaataataaatgattaccagaaatacaaaattaagccatatgtgctcttaagtaattcgaatccagatatccttaaaatgtcaaaaagatgcaacaagagtcaggagcccagaatgacgcaaattacaggaatggggaggaggtgatttttagaagaggtgagagaatggaatggggaacagacttgttttcggcaaattctcctggagtagactgggcagccccctcctccaggctcagttccaaagagtccgttgtgtggatatttcttttatttttcctttgaggactgcgcttggtgtttagttcatccttatgccgacctcttagaatttccaagatgcagggccttgggcagggcagggcatgggtgtgatttgccttgggccacaagctcttggtgagagtcttatgtccacacttttatctccaaagtgacatggagatcacttttctcagtgatcaaatttgaatttatcaaagggggttttctgcataattttgtatttgtaatcattatcagatttgcagcattctaattcggcagggcagggtatgaaagctggaaactcaggctggagtttctagttctaatggctctctggccatgtgggttgtagagtgtctgtcacatatgcactttatttcagtattaattgaaatacttggacacgcacgatcacaggcctatttggaggctctgtactatgaccctaataaccctagatacatcatgatacatggtgtctgtctcaggatgcaggcagggctggtgcaggcttctccatactcccttccacttggcaccagcaggcatcgagcaaccagggatcttaaactggcctctccaaatactccattgaacaggactgcaggctgcacccaggctaatgggagattggtgtgttgatgatacagtgtttaagatgagattgcagtgagttcctccttaatcccagaagggcaccatgatgaatgccacaggagactggaccctctttgagaactgcagatattagttgactgtgggtcaccctcgtggccaaggagttgggattggccatgtcttcttcgaggaggtggagactgtaactgacactggttatctttggggttgtctttcctgaatcctttggcatgtggcaccttcctgccacatgtagataattcacggcattaccaagtcaccacgagccccaccctcacctctgtcaaccgaggacccagccaggcagtgccatgtggtctcccaggcacgcttctcaacaccggctacccctgctgtgaaggttctcaaggccctggtccggggagccaagccctgggagcgccctaaagctccgcaggtaactgcactgcagcccgcattgagaaccgcagctctaacacagtgattgcgagaggacacccattctgagctcccacagagggctccacctccccaagaatgtctcattgtcattggaacagccagggtcaggcagcttctgctcggactgacgtggcgtctgacccttggtgggttgccagacattcctgcctgtttccaccatgggaagctgtcactgggaatggtatggagccctcacttctaccccaagcctgggtgtctgctgcctccatgtcaaaaatggacatttctggtcctgcccagctgctacctcaccacaacccatgctcagagttgtcagggatgcgtggaacagcaatgatgggacagcaaatgactggcaatttccccaggtcccacgctgttctggagtggacgtgttgcggccctgcccccgatgtgttccagcctcatccaggtgcacaggatactctggggccagcacagggattgtccagtgatgctcctggtgtccacaaaacagctctagagatacctgcattttgaaaagcctgctgagccaacaagcttggggcaggacacggatttctttggcaaatctgcaggcgagctgaccacttgcctggtgagtggaagctgccattacctggccagtgtttgcaactcgagggaaaatgacagctgcatggggggaagcctgacctcccggggagctttattgtggcctcagtggaaagattggattttgaaacctgccagacccaactgaaagaagggtcattcctgattgagttggagactctccccagtccctctctctggactcattctagctgtggcctgcctgtggacagcccttccctttggcccatgcggcgggtccaggcagctcctgcagctgtgctcatggctgctggcccagaacttctcatttttgccatgtggaagcagatttgctagtagaggaattttccaagtcaagggaagtgttgccaaacctcttgcctcgacctgtggggggccttctgctcttgttttctcattctctttggagtgggcacagaggggacaagtcggcccccagtgaggctcagggagtgcaggagaccagggagggaagcccagatgatggggaaacagagccaccttgagggggtgtcatggggtcagtgtcagggtgatctgacgggtcagttcatacttaagcaacattattctgttcgtttcttttgggtaaggaattcctcatgggaggtgtggtcatctggtcgtagaggtggacagaaacaccccctcgtcttcctgagccatttggaagccctttcctctagccctaggtactggtgacacaggcccctcggtctcaggatgtggacagggctgggaggtgcaggcttcttgtcccatccccactcagtatcatcgggtatctggtagtcaggggtctcacagtggcctctccaaaagcctggtgtccttggagaacatttttcattttgtctgttttcgttgctttgaacagctgcattcactcaccgagggctcgccctccctggatctgccatgtggttcagggaggaggggaccgatgagcaccgaccccttctcttcacctgtcagtggccaccacagtgccccctctggctttgccaccacgttctcctgcccccgtcaccttgtctcttctaactcattagcctttccttcctttgtctgttttcttctcccagctggtttaagttcttgatcatccctggcaccacctaccctaaggtcttccaagaacagaaaagccagggcctgtgtggggcaatgtgttgtccctgtcgggttatggtgggacctcctagaccccagagtgaatgaatggcaggcctgccagtgactgtgctgatggcttagaattcctacacggctgtgcctctcccaccccgtcctctttgctcggaagggagacctggtttgctctcctccatgacagcccagcccctgctgtgcacaggggtggggctcgggatccctccctgcaccctgatgtttattaactgtagatagtgaatttcaagttgacaggtaccttctcagggatttatatataaatatagttagaggaaaagttgaagtctattttactactttttagtgtttgagtaaattatgctttaactggacagaagaaatatttctcagacaatgtcgatgctgctgatgacaactgagatgcctggagctcacccttgatggagacttccttggtgattggagatgggggactctggtggcagaaatggctttggggtaggtgtgaagttgcttcagtccctctgagttgcctcttctggatggaacgtgtgtatcaacaacaatgaaatgcacctccgtgtgcatggaggcggctgatgagaatacagataggccagtcctcgctcttccctccagaaccggccgctcccggtctgacgttggagcacgtgaactaagagtgacaattttttctacttgcttctgtgaataaagtgttctacagtcagcccagcactaaactcaccagaaaagaggagggaacagcacggagccattcatctggaattactcgatgtgcagaggctgccccttggccgcacttgggaacatcgtggacatcttccttcctctcaggctcctcctgacagactcctggcagcactggagacctcaggactatggagatcagaattgtaatggctttgtcatctcagtgtggccactcctgaggcaagaggctcctcctgggagcaggagagagagagtttgtgatgttggttggaaaataggatttatggatgcaggagggccgtgctaggcccctctgcccgcttctctccctgctgttggcggtgaccaggtctcaggagcggagacgaggctgttgtgagtgaaacagaagcccctggcatagggccagaccctaggcctgaaaaggatgcaaagcctgctgttttcaggctgttgggaagaatcgtgcgtaccgagtgattatgatgaaacgtatcccagagaggaaatgaatgggacctgaaaagtgggtctgccacatccctggtagcccgcctccaagagcactacactccccccagccccaccggccacactacatgacgtgggaaggctgtccgttcatccttaccctggggactcaagtgtgctctgcggagtgagtcacagccctgatgtgcaccctgcactactctttccccaggtgcgccggagacgcaggcttgctcatttccgtcctgacacagctcgctgttcctgcggtggtcagagtccccctgtgctgtgtcagctcctggacactactagtctttcacatgataaagcgcgagcactttttcgcttttgcagtatttggggaaattctaacacatttcccggggatttgcccaggtccctccacctcccacggtgggtaactgtgtggattctgcacctggcaatcggcgctcccctttggaaacacctgggggccctgtttcttccagcctggtccttggtttctaccccagccgctttcagccggcacctgcatgggactgcctggagggccacggtccagggaaggacaggtgggaccctgaccatgacagatctttctaaaacaataaagtcccattgatgacaactgcagtgggatgaatgccattgcagcggtcatgctgggagctgccgagagcttacaacaaaagcagttcctctcaagacactgcttgcatcttccctccacgcctctcggtgcatttggaacttgtttatgcgctggtataactcgagtcagctgcttatttctgtgcccttgcactcacaggttccttcattaacattttaaataagtggctaaaaaaactcctctggaggttgtttttgaaagagacaggaaaaagaaacacacagtacctggattgttttgacttattttcaagcgactcagctgaaagccggtgttgcatacacaatttcctcacgctgacccagcctgactaagacttgataaaaggcacagcccttggcagcaggcagtgccaatgtggacagtgtacactaagctgtgagtgtgtgcacgggcgagcacatgtatgtgtactcatacatccagatgaactaaagggacactgggctttgtgctggcaaaggttacgatgctgctgtagcttggctgtgggccccaggcagtgtcagatggaacctgctttgatggcgtgttgttcagtgtactcagtggggtctcacatggcccgaggacccactgtgagcactccgcccgctgtggcacagaacacggctggggtcatcacagcccaggtctttattgaaaggcggctcatatagaacccatttggccaggtctgggccatctctctgcctctgccctatcttggctgcctggaggggcccaggcccaagaggattctttacccctggaagagctccccaggcattcagcctatggcccttgacatttggctgcaggttaccgtcagaatcaacaccatatcctgaggaagccctggtatttccccaagtctgcctatgtattagacactctaatcaatgctaacacagttcagtttttgagggaactagttttgtcataatactacacccctctattgtttttaaataagaaaaaaaaaaaccccacgaaactttccatcaaagcaatggtccgtgttggcctgatgctttaagaagtttgaggaggtaggtatggaggcaccttaacaccagtttttgagcagaagttctagaagctgatttagaactacacagctatggatacacctgatgaaaaccgcaaaaggcgatgacaggcccagaaatatgaccagcaagcccgtgagcctttggggcatccgactgaatttgaaaataataccccattcagatgaacattaaaagccaatgtactggaattctctttgttctgcccgacatttgggggtgtccaaggacctgtgtttttaacaaagatgactttatgaccgttctaaggattgaacagattcctgcacagggtgccaggtttcaagttaggtcctcttagtataagctctctttttttctgaatgtaaacctatttgcattgtcatttctaataatccagtaggtttctggatattgtaaagatactgagtacagatataactgtgtaaatttcatagtgttttattttgaggtgagagttttgttatagtttataaaagatattttcctattcagacctcagggctattttgggacctacaaataaatgtgattcccagcagcttcaatttttgatattcaaaaagttaataatctttaagctaaatataatgtgatatgattcagaaaaaaatgtttttcccttttaacttctaacaaattatgtatctaatgtttaaaaaatatggaaaaaagggataatgtaaaaatgtgggagaattgtggctaaagaataaaaaatcacttgttaaaacgcattcttatggtacaaatgtgtgatatttaaataaacttaagtgtgtataaattagagaatgatacagtgaaatataccaggatttttcatgtcacttcttttcattgaaatagacgttcactttcttatcgtgacaaactttcaccttatttttcaaaggtaagatttaaaaattgtgagttccccacaaatagtttgtcacatgttcagatgatctcattacaatctgcctcttctcagaagaacccactggcaggtgggcatccttcagggatgttgccatgaatttatgtacatacataaaaacaagaatataattcagtttctatgtgttcttttacctaaatggtacactgtacaggttgtccattagtttcttttctttacttaaaatatgtccctagagagctttttaaagaatttaaatattttcttttgacagctaaaaaagtaatacacaaatatgagaaaaaatgtaaacattgtacaaagttctcagatgaaagtgactttaccttcccccaagacagtccctcagaccagctacttgtacatccttttagaaataccttttgaatgcgttcttccctccgtactgtgcaaacagaacccgatgggatatagagtctcattcactcactgtgttttgggaagggcatgttggtccctgctttgttctttttcattgctgtgtagtattcctcagcagaagtgcaccatggttcatttaaccattttctcatgggtgaacttttcaaatggtcccggtttttatgatttgctagtaatgaagatccttgtacctacccaattgtatacacaaatggatatcttttaagataggagtgcagaagtgagatctgccaggtttcaaagaatatgtgttttaattgctatagtcactgccatggtgcactttgcaaagctctgtggtgtgtgcaaccaccagcagggagcaagagaggccctttcccaatagttagaaaattgtatctcgttttaattttcatttcatttcattttcccagttgttgatgtggctgaacatcttttcacctgtttttcaacattttaatttcctatttttacacatttcttatttatagccatgtctcatttggtgtttttttttttttctttctaaggatgggggtggtgggtggaattttatttattttgttttttttttatttttgagacggagtctcactctgcctcccaggctggagtgcagtggcacgatcttggctcacttcaacctctgcctcctgggttcaagcgattctcctgcctcagcctcctgagtagctgggattacgggcactaatttttgtatttttagtagagacggggttttgtcatgttggccaggcttgtctcgaactgctgatctcaagtgatccgcccgcctcggcctcccaaagtgctgggattacaggcatgagccaccgtacctggcccctcatttggttattatttcactttttggtgtcatttttgc

SEQ ID NO: 29 - DNA, 231282 bp, Homo sapiens
  source 1..231282: mol_type = genomic DNA
gcctcatcagtacatctcttcctacctcgccttcctccgctgcagcttctttcaagtccacatctgcgtctccgtcagtttcctctgggattccatcggtgtcggtagcccccgggtccccgggcacagcggccgtctcatccgactcccctgtctctccacctttgtcggagggcgactcgtgggcatcgtccatcacggataggattggaggggagaggagatcgcggagatgcctgaggcagaagctcggaaacccgagctgcacaggccaggatcttacttcctgtcgtcgcgcagcgatgacatcacccctaccgctctcctgaggggtcattttgaggcgcgcgtagaggactagaggactcattttaactttggtttggcgacagtgggaagcgggaaaattggacgtaaagagctcagactatggatcctcctcgctaggaaaccagcacttgtgaaggagcgcagttttgtttactaaataactttttccttttcgcctgtctaaaaatgcaatgtcagttaatcccttcgttaacccctcagagtaaagttgggggactgggagaaaactcagttccgttgtatggcggtgtcgtggaatgaggctccccgggactggtaaactttcaggcaaggactcaaccttgtatatttcaactggcccgaaaccgcgggcctgtgtgtacatagaattgctagcatttcccctccattccgcaagcaccttaacaacaaaaagtcatatagctcgagcagaatttatccaattcatttattcatccacaactattgactgcctacttcgatttagaaacagtgctagtaccagggaacaaaacacacatagtttctacccaattaaatgatttttttcagttcgccagtactgaagattgaggtttgtttttacaagtctgacacttttctatcagtttggttaatctcattaaaactaagaggaaagcctaaagagaggaaggtgtctcctttgaacgtttcactttaatgaactagttcacgtactgggaggatgaagtggtgaggatatttctgttttaaaattttcttctcttccctcattgagatacgagggggagggcgttttattcacctgggtatgactaggtccccgcacctattacatatttaatttatgcgtgctgaaagaatggacttggaaatgtaggtgcgcgttacatttatctctttgtttctacgctgcctggacgaattaccgtatttcctgtcccaggagctcccaaaacctttggggaaggagcgcacttcgggaggcgcgtacaggtgggcctgtttgtccctttccacctgcataatgggggcccacaaggcgctgtccccatgccccgagaggcgtgtctcggcacagcaaagtccacctgcgctggtccgcggagccccgcccagctaggtgagctagggggcggggcgcgggggcgcggtgacgcgtgacgccggatcccggaagtgacgcgctcgtggggaaaaggcagggagggggtggtgtccccagccggtttggggggtgcgttgcccggagacggaaagtttgggagcccgagcaggctcggctgcagcctcggggagggggtccagcgggtggcggccctggggatggggaaggagcaggagctgctggaggcggcccgcaccgggcacctcccggcggtggagaagctgctgtccgggaagcggctctcctcaggctttgggggcggcggcggcggtggctctgggggcggcggcggcggcagcggcggcggcggcggcggcctcggctcttccagccaccccctctccagtctgctcaggtgggtacgcgccagggccgggccgctgcctgcagaccctttctcccccacccgtctcttgggtccccagagagatcgggggtcctgagactcgggcggggtgggcttgtggcgtgcccggggcgaggcaggcggcccgcgggccagggtaccggagggcgcgcaggtccgagtccacgctgctccgggctcgcctggtctcccgttctgacccggctgcgaagaatggtgggagtgcccaggtggcagcctccgccgcatggcacagccagggttcactctcgctcgctacagggtgccagctatcgtagctcacaaaagccaattaagagcaaatatgtatatcttatatatatatatatgagatctccctcacctcctgcagaaactcctacgccttgtagaatctcgaggctcctctggaggaaattctattgattttcttctctgaggaacttggaaccttccaccaggctacacaggacctcgctttatttttttttttccctcgagacggagacttgttctgtcagccaggctggagtgcagtggcgcgatctcggctcactgcaacctccgcctcccgggttcaagcgattctcctgcctctgcctcccaagtagctgggattacaggcgcccgccacgacaccaggctaatttttgtatttttagtagagacggggtttcaccatattggccaggctggtctcgaactcttgacctcaggaaccgcccgcctcggcttcccaaagtgctgggattacaggcgtgagccaccgcgcctggcccctcgcttttgttttattaaaattgcctctggatgtatcattttcaagatgttcgtctttgagcctctcttgtgcttgaagttcaaattgtagttccttgtagtgaacctcattggattagtctaagtggcatatgcaggattcatccaggggcttattcatctagaaataaaggcagagagacttgtttaggaaaccgaaggatgctgtaaacttttccaaggtctgttgttaaacgcttcaatctggagctgtaaggaccgagggaaaaacatcagttttgtgtggcttcgaagggggattgggggtgctttgttagtgtgagttaaatgtgttagttcagcagcgctttcatagcctgatttctttttccttccttgttcttttgaggtttttaagaagtggaagttcatttagaaatgccttcgttagcttttgttccccattactttatgtaacttcagtttgagtgagcttggaccatataagcctaaggcgctaataaattgttattaatagatattaagcactgagtaccaacccaggtctttacaggaagattttaaaaagcaatataagtaggtacttaagatttgttgaagaaataaaagtatcagttgcaggacaataaatttctaaataaatggatggtggatggtattactcgctgtaattgctagcagctcagagaacagagacatcatttagggatggagtggaagtcagggcttccaaaaggagggagacttaagctggccttgaaggatgtgaggatttgggtaggtgagttatgatgggcatgtttcaggtgggtaccccatgatcagaggcacagaaatgagaatggagacttatttggtgctccttaggcaacaggagaagaacttcctgcctgcacccttgagaggttgggcataataaaggtaaataataatggatgggtatacttccatatatcatgtttatattctcagtccctagatcagtgcctgacaacttacaggtgtttaataaatgtacagtgaatgcatgaattgggttttgaatcttacctggatttgccactctgcagttctgatgtctgagaggtgacaagactgtacaggtttggagatgcctctgtctttaatgagttgatgacatagcatttggagattttccagagatatcttaaccctcagcatatcctgctaaagtgagaagtttctcatatctcccaccctcaaacacaggtcaaattattcttttttttttttggagacggagtctcgctctgtccacagtctggagtgcagtggcagtatctcagctcactgcaaccttcgccttcctgggttcaagcgattctcctgcctcagcctcccaagtagctgggactacaggcaagcgccaccacacccagctaatttttgtattttttgtagagatggagtttcaccatgttagccaggctgttctcaatttcttgacctcatgatccgccggcctcggcctcccaaagtgctgggattacaggcgtgagccaccttgcccggcctcaggtcaagttattcttagtgcgctcactcggagactattgaaattctgctgaggatttaactgccatatagttaatatagttaagcaagactaggaaacctgttgagcacaatgcttctactttgggcctcttgctgatgtgtcctgtctctgccataaagtgtgttaactctctattccctagagttagagagctggctcaccttgacttgcttctgtgtcttttgtagagagggtaaatgcctaatagcttcccaacctctcattcctgtgactcctaggggcagggaggatctggaggcactagttacactaattagaggtgactctggttaaagctagtaaaagatttctgagcaaatgagaccatgcctaggtcagtatgtcctccctttttagatgtggacatagtgaagggtaggttacctctgctcccaaccctctctcccctaaagaccctggattatttaatgagagctgtggaatcatagcttcagatttggcctttgtattagcggccatattctacccctatttgtactgccaactgtaacttgcctgaagtaaagctggcagaaataggagcttacagttgcagtggaataattgttccagaccacacatgtgtttgtgtattcacctgtttgtgttcccccatcccgtattccacaaaggctttgtgtttattcttaagctaaaaaatgccctcttctcttacccatcccttttcctctacacagcttgggcttaggttttaacttcttaaagcccttcctgatgaccctaatacacacagatctctcaagcttccatgtctttggagcacgtcatctgtagtgtactttgcttgcctagctttcacagttgatcgctttggcctgtcagtataatgtttacatatagcaaccctcaccgattgatgctatacctgagaatcagaaagtcagcaaagaagacttctactagaaaaacatgttgttacaaactttgtgttcttctagccttccttatttactggatatttattcaggaacagtatagcattatactgtccactttttcttagcattaagcatgttatagcattaagaccacttgtttttgtgtcagacttcctggattcacattccactgccaccactgactagctgcttgacattattcaagttaaccactttgatactcaatttctgcatctgtaaaatggggataatactatctgccttataggtatcatcttagataatgtgtgtacgggacttaccataattcctggcatattctaagtcctcagtcttagtcatcctcagttcagcacatacggttttgctgtgttgcacctgttctgtgcaaagtaccatgccagacacattatttatttttatttttgtagagatcgtgtcccactatgttgcccaggctagtctcaaactcctgggctcaaacgatcttcctgcctcagcctcccaaagtgctgggattataggtgtgagccacagtgccctgcctgacacattttaaatggtgttttttcatgcttggggatctgttttccaagcatggcagactagaaagagtaaataagggagaggaatcattcatatacccaatgtttacccatgatatactttgtgccaggccaagtgattgctagatgcactgcaaaatatgtctgagacctgggacattgtacgtggtctgtcagaattagcccctctcttcatacatgttctgttcccttacagagtttatagtagtatgatacgtctgtgtaacaggccaacaaaaaggagacagagaaagcacacaaatttagcataatttatcctacctcccggctgtttgaagctattaacataggtgtatatagccctatatacctatgtaagccccaagcatcagtttactgtatctttgtgctatgatttatgtttattatgactgttagccatcaaataaagattaaattatgttcaatatagcttgttagtgaaagaagaaaaaaaatatagttttctatccaaaatggtttaaatataatttttttacttaaaaggataagcaatagattatctagaaagcacagttatccagaatgtctaggcttacagaggctctggattgcatggattatactttatataatactaactcattttctgattgtttaatggatgcatgccttcggtctataccttgggagcttgggataggcattctatcaaacttcttaacttacagtattttttagttctgggcacgtagcgggcactcagattctcatgtaacaagacagtttgctatgtttagagttatagtgaaatactgatttccaagaaagaaactcctgtataagaatattgtaagatttggttaaaagtaaattctatcaactaaaaggccaaaaagatctgagaaaaggaaatgttaaaaccaatcatggccaggcacagtggctcacctctgtaataccaacactttgggaggctgaggcagctggatcacttgagcccaggagtttgaaaccagcctgggcaacatgctgaaatcccatctctacgaaaaatacaaacattagccaggcgtgatggtgtgcacctgtagtcccagctactcgggaggctgatgtgggaggattgcttgagtctgggaggttgaggctgcagtgagccaagattgttccactgcatttcagcctgggtgacagagctagaccacgtcctcacaccaccaccccccaaaaaaagaagaaaaaagaaaaccagccacaatagcttcaaactgtaaattgagttatgaactaaatactgatgtatatgaatggaaaagtaaagtgaaatgtacttcttagggttcagaagcacagagaaactaaaccgaagatcacagttgaggagattatgttatggtttaggaatattttatgcttaatttctcaagcatgagaagggtgaataagaaaagaggaagccaaggagacttgctggagaatctgaaaatttatagatagtagcaatgaatgtggctttaaactaatttttatgctgccatttcattgggggaataaaagaaaaagaaaactattccaaaacagatatgaatttcccaagatgtgaaaatgttctgaaataaggaatgaagcatgaaaaattttgaaaaatggacctcatttggaggataataacagattctcccaaatgtcagaaaatatggcaagtaattcattgttgtaaagaaagcttcctaatatttatttaaggactttggtttttttttttttttaattaaaaaaaaaaatttaagagacaggagtcttgctaatgttgtccaggctgaccttaaactcctgggctcaattgatcctcctgcctcatcctcctgagctattgggactgcaggcacatgccaccatgccaggctagacttcttcctcttgttagtgttattattttttaaacagtgattagcataaccattctattgaaatggtcctttattcattcccagaatggatctgaaccttggagattataatggcgtgacagccttttctcatgctgacctttttacttttgcccactactgtgccagatttcttttgaaagtgcctattttgagcaaaatgattttaacatcttaaggaagagggcaacactgaccatgtaaggattgtagaatggaagggcctggaaacagatcttgtggatttgaatttgtctgatctaagttcctgctcttctaagagaatgcaaaaacaagataaaatgcaactatccactagcatagcagttttctgggtcttccactaaactatcttaattaattaaaaatagtttttcaagaatgtctttctttttttttttttttttttttttttctgagacagtgtctctctctctcgcccaggctggagtgcgatggcacgatctcgactcattgcagcctccacctcccgggttcaagcgattctcctgtctcagcctcccgagtagctgggattacaggcgcacgtattttagtagggacgggatttcactgtgttgcccaggctggtctcgaactcctgagctcaggcagtctaccctcagcctccggaagtgctaggattacaggcgttagccaccgtgcctggccttttttttttttcttttttttttcagagacagtgtctcactccttcatccagactggagtacagtggtgcaatctcagctcactgcaacctctgcctctcaggttcaagtaattcttgtgcctcagcctcctgagtagctgtgattacaggcatgcaccactgcacctggcgaatatttgtattttagtagagacaggggtttcactatgttggccaggctagtctcgaactcctgacttcaagtgatctgcctgcctcggcctcccaaagtgctggaattactacaggtgtgagcccccacgcccagccaagaatgtcttaaaatactccctttaagtgtgattttgttgggagggcagccctgttcctgcattttggaattgctgtacttacatttttgctttctctaaagcagagtgtggttcccatgttaaaaaacaaaaggaaacaaaaaaaggtaacatgcttggaaatgacttttgtggtagttactttatatgtaaaaatctagaaggtgcctaatcttaaactgagtaaggcatttacttagaattaaagataatttacccagcctgggcaacatggcaagacctcgtttctacaaaaaataaaaaaactaggccaggcgcagtggctcacgcctgtaatcccggcactttgggaggctgaggcgggtggatcacctgaggtcaggagttagagaccagcctggccaatatggtaaaaccccatctctattaaaaatacaaaatcagctgggtgtggtggcctgcatctgtaatcccagctacttgggaggctgaggtaggagaattgcttgaacctgggaggcagaggttgtagtgagccaagatcgtgccattgcactccagcctgggcaaaaaagagcgaaactccatctcaaaaaaaataaaaataaaaaattagctgagtgtgatggcatgcacctgtggccccagctactcaggaggcagagacgcaaaggtgggagaattgctagagcccagaaggtggaaggttgaggctgcagtgaaaagaaaatttactacaaagtttaagatttaaagtcagtggtctccctttttcctgcatcctccaattgaagttcagtttttactttcttagttgcaaaaattagagacaggaaacaatgaaacaagcttgtgatctgaagaatttgacttgtatctagtagcttcagcatgttcacgggtcataggaggttatggtcccagtgaaagttacattcttggccagaaaaatcccttcaggaggttctttttcccacattggattgttcaccccaaacagctgtgaattctggtttgcaaaaggaagtccaggctatttctgccctagtctttcatagggaaagtaaattactgggtttttagcccagaaacactaaggaaaccccagaagtagacagtggagagtttgttcttagaaaaatcaggctctcctgtgggtaggaacttggtctcttttttggagagctctcagaaaatatttcccacactgatttccaaaggattattgggagattttctgtggtagagaaaattatatcgtataatatgttacattcatagaacatcttcacataactttggtgtggttagagttaatggtagtaatactggaaattatatggtatgtcttcatatttatcctttctcagtaatttgtagatcaagtttgtttagtttacaaatcaaaaaagagtttttaaaacaagtcagttgtctctgctttgaaacaagatagttgtatctgtttgtgatattattaccactgatccaggaagcagaactgcctcctggcctacttaagtggtgaggacatactatggtggctaaggatcaggttctgacccaactctgccttgtgacttaggcaaattaagtcacttttctgcgcctctgtgtcttcatatatataatgggcctgggatggtgcctatcttctaaagcagcattaaatgagctaaaggatgtaaggcatataatgcctggcacatggcaagggtttggtaaccctcagctgctagaatcatctaatgggagccaggtgcttgccacccttgatgaatcagagtgaggaccctgttaaggacatatcttttattgatgttgccattttaacatttataataattcacagcagaagctcccaaccttttaaactatgaagagtcccatagttttaaaaagcctgaaaattggcaatggtggcaaagttacaaagcaatccaggtccacaatcctttgtttgaaaccttggggccagatatgttttcagggtgctgactcaatattgtatattgagtccctagtgggactgtggcagcaccctggaaacattgtatttctacagcaaaacctgtaaatattgactaaatgggataaatatgaagccgcttcatatcagcgtaggtcaggttttgcagctaaatgactgctgctaacttatgaaaatatattttcagagctttttggatttctgaattgttgataagggactgtaaacctctgcctttatggtagaaaaattgcaagacaaagaaatgcactaagaagaaaataaaatcagttataattttaccacctacagaaattaacttgaaattttggtgtacaatcttgtttttttctgtgcaaacttttttttttaacagaaatgacattattttgtatatactttgtctcatgttttcacgaactatattgtgaaaacactttcctatattttctgtcctcctcaacctcattttaaatggatgtgatatccgtggtatatatgaattgtaattaatttaacccctttcctgacatggaacatgagtttgtttttcgttttttgctattagaacagctctgtgatgaacatgcatgtggataagtttgtgtgtacattctgcttataacatttgatatattcaatagaatggtaggtgtagtttcaacattcagccattgcagaaatcaacagctgaatattcaaattgcacctcaaaatcaacaagaaacatacatgttgttgaatttgaggactcatagtaattctgaggccccttacatctcctgggtccttctgactgggaagtaatatactgatttatggttgctaaatactacttatattcagaaagtaacctttgtgcaagcccaggactttttaatggttaacttaaggctttactggttctttttcatagaccaaatgtttagaagagggccattaataatacaaatgcatggagcaatatgctccaagcagaataaaataaaaacagctttatggcccagcatggtggctaatacctataatcccagcactttgggaggctgaggccagaggatcacttgagcctaggagtttgagagcagcctgggcaacatagtgagacccagtttctattaaaaaaaaaagtaattaaaaaacaaaaaaaatagctgttattttgtaaagtagagatgaggtcttgctatgttgcccagtctggacgcaaatttattttttcttttaaattatagttgagacctatttacaaaaagactgatggccagaaaagattacaaaacaaatcagttcagagctgtttacctgagtgtctgaaaggttcttagactttctgatgtggtttttagaactttaactctttgctgtacctggggaggagccccagtcttggctttgctcataactatccacatcatgctcaccactcttcctctgatccagcctggtggagtctgtgcattggcttttgtcctcaatggggccagccgcctgattcttgctttttcaggttgccctgcagccatgatcaaacttcaatgcaaagtccagcccatactgtagtatttgaagtcagtaactcaatagctcagaaatgttgctactgacagtattgtgggtgagtgtgtatgtgtgtatttgggatgggtgggatggtttcacttcttgagcacttaatactttgctctgtctgtgccaagggctttacatacatgtatttgctcagtttacctacacaacatgcctgcaaggtaattattgttatttccattttacagatgaagaagcaaaagttaagagagaggttaaagtgactagcccagggccacacaggggagtgcagagcctggcatctttgtgattccaaaacttttgcttataaagcactgcatttggccacttggagaatcagtctctttggatgagacttaagcgaccacttactatatgcttaggtaaaattttgctgaaaagattaattagggatttatttaagtttaatagttgcttttataccacttcatgctatacccttctaagcactttacaagtattaactcattttgtcctcataacaactctctctgttttttttttaataacaaaaatagagatggggtctcactatgttgcccaggttggtctcaagttctggagctcaagcgatcctcctgcttcagcctcccagagtgttagaattacaagcatgagccaccacacctggccataacaactgtttgaggaatacactagtagtattgccattttactggtgaggaaactgaaacacagagagatgaagtaacttgccaaggtgcagtaagctagtaaaagttagagcttagttttgaacccaggcagacaggccccagagtctttgctcttggttattatgcaactgggacttcttccttttacccaagaatgtaacacaaagtcctttgggaagactttgactacatacagtgaggtaggctcattaaaaaaaaaaattggcaaattccctggaacacaggaaagttagataaagagaatgcctttacgtctatgccaaataatatattagtttagagaatgtgggggacttccctatagctcccacattgctttttcggacttctagaaaattctcatctcatgtaggtgcacgtgttcatgaattttacctgtgagaaaatttaagtggtccctgtgccccccgcaaccagttcaaaatgataaaaattagttttggacccataagctacataaactgccagatgcactaccagggccaaagtttgtacaggggaagtgaatctaaacaattggcaagaaccaaaagcctgtgtatttgaagttatttccaactctgttttttttttttttaaacaattcgctccctcattagtgattaacaaccaaaatttgcattctcaaataattagttggcccataaaatgtttttcagacagtattatctggctggttcaaatgatggttgatgctgtcttgaagcctaggattatgggatgggaaatgttactttccataatccttggtactttaatcttcacaatccttcaatacaggtattagtgcccattttactgatgattttctagtggttaaatgactggcttagaactgggctgaggtggggttttttttgttgtttcttttctgagatgaggtctcaccctgtcactcaggctggagcacagtgatgcaatcacagctcattgtaacttcagcctcctgggctcaagcaatcttcccacctgagtctactgagtagctgggactacaggctcatgacaccatgcccggttaatttttgtattttttgtagagacggagtcttgccatgtttcccaggctggtcttgaattcctgggcttaagagatctgcccaccttggcctcccaaagtgttgggattacaggcgtgagccatcacacccagacaggactgaggtgttctgtttgtgaggcctttaagggtcctattttatgcagaatcatggctaccaaaaagacgtctgtggaagtataaggtggaaagtataaggagaaggtagtattctagctaagtagctctgaaaatacctatgggtcctatatacctaacagtaatagaataggcctattactttttacctacaaatgaaaatactttagatattgaaattggcagagattccacatttgttactttttaatctattgctatctccataattgtgtgtttaagactcagctggagaatagttttcttgctagtcactcatcagcagtctctcttgccatctttagcagacccagagcagagtttcaaaagacttttcaagtagatgatccagggcttagtgcttcattttaaggtttaagtttttcttttttgtttcttttttttttctttttgagacggcgtttcgctcttgctgcccatgctggagtgcaatgcgtgatctcggctccctgcaacctccacctgccgggttcaaacaattctcctgcctcagcctcccaagtagctgggattacaggcatgcgccaccatgcccagctagttttgtatttttagtagagacgggatttctccgtgttggtcaggctggtctgggactcctgacctcagatgatccacccgcctcggcctcccaaagtgctgggtttacaggcgtgagctaccgcgcctggcccaagtttttctttttaaaagaaggagtgtataaaaaatcaggtccagtacttttactagatatgttttgtcgaccaaattgacagagctgtctttttaaaagatgtctttttccaggccaggtgcggtggctgtagtcccagctactcgggaggctgaggcaggagaatcgcttgaacccggaaggcggaggttgcagtgagccaaaatcgcgccattgtactccaccccgggcgacaaagcaagactccgtctcaaaaaaaaaaaaaaaaagatgccttttccttatccattatgatctgttagacttgctattgtcttcagttaccatcatttccggttacctttctctttaacatatgttcttttgtaaaatttatagttcatttacagagaaaactgatgaaaatagcaatccaggtaccctagcgtcttctcattcaattggcagatatttatgaagacctgattcttttgggtgaaatttcacagtcacttaaaaatatctgtgtttgctgagaggaatgcattataccaaattataagtttggtataatgctgctagtactagcagaatgatatagtagaagctaaagccaatatttttttggatgtatgtgtggggcgttcccactgtaatccataaaacccatttccagtaacttctgtcttctgtgttttttatcctaatattgttactttcaaattggctcattgtggggtttgattgtcattctgctgcaccaatttgcccataaacctctgtatctctttaacaggcaaatcatcatgtagaaaaacttttttttttttttccaagagaggatcttgctctgttgcccaggctggagtgcagtggtgggatcatagctcaagctctcctccaacctcactcagtcttttgagtagctaggactacaggcatgcaccaccaagtttgcctaattttgtttgtttgtttttttaaattgagacagagtctcgctctgttgccaggctggagtgcagtggtgtgatcttggctcacaggggcctccacctcccgggttcaagcgattcccctgcctcagcctcccgagtagctgggactacaggcacgtgccctcatgcccggctaattttttgttcgtttgttttgtttttgtatttcagtagagacggggtttcaccatgttggccaggatggtctcgatctcctgaccttgtgagccacccgcctcggccttccaaagtgttgggattacaggcatgagccactgtgcccagcccatctgcctaatttttaatttttttatagaggtggggtcttgctttgttgcccaggctggaatgcaatggcacgatattagctcattgtagccttgaactcttggcctcaagcaatctttctgccttggcctcccaaggtgctgggattacagcactggctgaagaacattttctgatggattgaatcagctgtgagtttgggccacaaatctgggactttttaaaaaatatgaatacagtcgtccctcagtctccatgggggattgattctaggacccctcgaagataccagaattccagctcaagtcctttatataaaatggcgtagtatttgtgtaaaacctgtgctcattctctcgtatgctttaaatcatctccagtctaattataatacctaaatacagtataaatgctatgtaaatagttattaaaacatattttttagggaacaatgagacaaatagcctgtacatgtttaatatagatgcagccatccattttttttctgaatattttttttccatggttggttgaattcacagatctagaacccatcaatatcgagggctaactgtattatgtaataacctaataaccaccaggattgcctttcctataattaaaaaaaaaattatgggctgggctcagtgacacaagcccgtaatcccagcactttgggaggctgaggtgggcggatcacgaggtcaagagattgagaccatcctggctaacatggcgaaatcccgtctctactaaaaatacaaaaattagctgtgtgtggtggcgcacgcctgcagtcccagctacttgggaggctgaggtaggagaattgcttgaacctgggaggtggaggttacagtgagctgatatttcgccactgcactccaccctggtgacagagcgagactccatatcaaaaacaaaaaacaaaatgttttgcacttcctgttgctcaaggtgacatctgattctgattttcttttcttttcttttttttcttttctttgtttttcttttgacagtcttgctctgtcacccaagctggattggagtggcatgagctcggctcactgcaaccttcgcttctcaggttcaagtgattcttctgcctccgcctcctgagtagctgggattacaggtgtgtgccaccacgctcagctaatttttgtatttttaatagacacagggtttcgccatgttggccaggctggtcttgaactactagcctcaagtgatctgcctgccttagcctcccaaagttctgggattataggcgggagccactgtgcccggtcaacgtctgattttctattggtgatgacataatgaggttattggagtcatcacatgatgaatctggctggcattaggtttcctcattaccaggaactgggccttgtgagattttgacacttaccacatcatgctcaccactcttcctctgatccagcctggtggagtctgtgcattgacttttgtcctcaatggggccagccgcctgattcttgctttttcaggttgccctgcagccatgatcaaacttcaatgcaaagtccagcccatactgtagtatttgaagtcagtaactgagtagctcagaggtattgctactgacagtattgtaggtgagtgtgtatgtgtgtatttgggatgagtgggatggtttcacttcttgagcacttaatactttgtctgtgccaagggctttacatacatttatttgctcagtttaccttcacaacatgcctgcaagataattattgttatttccattttacagatgaagaagcaaaagttaagagagagcttaactgactgctttttgtcattgttttgcttgtgaataacattgttttcacctctttgattggtctttggtttcatgtggccgtcagagtttgagtagagcaaaatcttctctccctctttcattgatttttattttagccttcagtttgatgtgtaactacctgaacgaaatccttaagtttgagttaagccttaagtctgttcttgttgtaggattttggcttggttaaggtctgtctggatcactggggtctggcaagtatccatttctcagttttatcctctggtctctgtgcttgaactctgaagggaagaggacatggctagacagaaaaaacagtacgcaggaaacattgtctccaggaacttttctctcttagagtgcatactggctctggggaagggcctgagtgagcagtgcccctcggggatcttctgcctaatcccacctcaaccaccatctagccgtatgatcttgggaatattttttactcttcctgtagctcagttttcttaccattaaaaaatgggtggcagggggcagtgtttttagcgtttcctggcagaggtccaaggaaaggtgcatcagtgtgtcttaaaacatctgcagagttagactggggaaaggagcgactgcttactgtcctcttactgtgtgccaggaactgtgcaaggccttttacatgcctggtgcgaaaggtcaagaagagaaagaggtctgtcttctcccttcatccatgggagtgtgtgagtgggaggttgctctctctgctcgtgaaactttcatcagcaaatactaattagtgcttaattactatatgttgtgcataccactgtagcagataacttaggaacacaaaacttgacaactcccttaagaaattggcttggttatctgtgagttttcactatcaatgactgaataaataagtggggcagaacagacaggtctttcttacagaagaattccaattataaatgtaggaataatgaggggaatagaaaatcaccattagcataccatagtaataattgctgcaggcaagatctaccagtgaagaatgaaattgggtgaaagctgaaggagaaacaatatttatatggcttcaaagtatcttccccagaatatttattaattcctatggcagcttcaaccgatgtccacttgttctttggtagtcctctctctaggagatggaatttaattctcttccctttttgagtgtgggctagacttagaaactggcgtccaaataatagaatatggagagagaacagtggtaactttatagtgggaaaatctggtagccactgcctttaccgagtaatgaaggttaacatcaccagtgataagtcatgctgatgtcacatatccccagatgtgatgtgatgaaaaggacactttgcctcttgtgttccttccccaaatccataacctcagtctaatcatgagaaaacagaaacacaaattgaagaacattctacaaaatactgagtagtactctttaaaattgtcaaggctgagaaagacaagcaaagactgaggaactgtcacagagactcaagagccaagaccattcagtgcagtgtagggtcctggaacaagggacatgaatgtaaaaactagggaagtatcaacaaagtctgtagtttagttaagagtattgtaccagtgttaatttcttaagttttgatcaatgatttcttaagttttgatcaatgtacagtcatccctgggtacatgtggggtattggttcgaggacccccatctataacaaaatccttgtatactcaagtcctgaggtcagctgtgagaaacccaagtatgtgaaaagtcagacctctacacacacaggttttgaatcccacaaacgctatattttttatctgcgtttggttggaaaaaatctgcatgtaagtggacccaagcagttccaacctgcattgtttaagtatcagctttactatgattctgtaaaacgttgacataaggggaagctgggtgaaagggatacggggctctgtgctatctttgcaacttttctgtaagcctaatattatttcaaaataaaaagtaaacaagcaaagggcctatttgatagaggctctgaagtcaagctgcctggtttcatatcttgcctctgccacctaccagttgggaggtatagatagctttctgaattgctttgccttagttccttcatctataataatagaacttctcatataaagttgtgtaatgattaaatgaggtaatgcatgtgaagtacttagaatagtggcaagccaggcatggtggctcacacctgtaatcccagcactttgggaggctgagttgggaggattgcttgagtgcagaagtacaagactcacctgggcaacacagcaagaccctattgtaaaaggaaaaaaaagaacagtggctggaatgtagtaatgacggctgctaatattaatatttatacagaggaagtccagcctccttttagttactcagccattgagccagggatgtaaatagtgctggaggagtttggaggaagaggctatggtaatggagtagggtggtctggagacccctctcctagactacttgtacccctaggaagtggggccctacctttcaagaaagccaaagattcagatagctgatagaagattggtgtggaggagggcagggaacagctagaggcagaggtagagaagcttaaaataagaaagacctgtttgcccagcagtgagtaagcggctatccagcaggagtcagcggaggtgaggttggtaaggttggctagtgctggatcgtcatgggattggatgctggcttgatagagtctaagaccttgtgtctaggccactttatctctaagtgctttatttctaagcctgagagagagacaattcaaacaataaaaaagttgtttcagtttcaacaggattgtggttgtactttgtttgttggttgaaaaaatatgttgtgacagaatgattatgaactcggtaactctctgaaataaacttgtgttttattaaatatagtagcttctctgtaccttaggggcatcataatatattattctgtgacatttattctgcctactgctggtgcttggtgtacgaatgcatttgctgaccctttacaataacaacatggccccaggacagagtcaccgttttaagtatgcagacatgctttttgacttccaagcctcatcttttgggttgtcttctgtcacaggggagtgtgtttcttttattagtaaagaaaaaaaaaagaaaaattattgtaccactagaaatatggctaaaaattattgaagtataatttacatacagttaagcacttggatattaaatgtacagaccaatgtattcttacctacatacacatctgttatcatcatgaagataacattccagtgccccagaagtctcctttgtgtcacctgctagccaaaaatgccgtccttgaggttatcactgttctgaccttgatcaccataaatttttgcctggggacatgtttctttttctccaccgtacacccatgttcatgcagaacagtggagtgggagcagggcagggtctgtatgtgccaaatactacactagacacattcccagacttaaataaattctcccgtaaaacacagacctgggcttatataacttgtctaaactcaatcccatgtcattgatgccaaagtcagtgttttttccattgcgccatgctctatgtcttcaactgacatttgccataatcattatcattatcattaatgaaaagtcatctgacacttgccagtagtttatatgatcaaagaacatcagttaacacccagttctcatttctaagtgcgtttaaatggtcaagagcttttaacataactctcttgggaagcagaatgaattaagttaatttagaaccaaaagataatggcaatttcttcatttaatgagtgccttgtttgtgcaagatcacgtgctggccaacggagttatagagagaaaagaagtctcaatcccagctttgtgatcttctgatgggggagatagagaatagtgtgatgagtgctatgaaacagagggatgctggagcatcagagaggaaacaaggggcagggctggggaaatgttcctccccgaagggatgaggtctgggtggagtattagaactaaaaggagttgtacagacaaagaaggggaaaagcgagagttattttaagctggagtgtgtgtacagtgtggtggctcagtgtgtgcgaagaatgggtgtctggaagcattgtgcattgagacgactgcaggtaactgcctggtatgtaggagggagaggggttctgtggagtagaaagagattagctggggtagtaacagaggtgagatgcccatgtaaaggagttggattttacattgacagtagttatggatttgcaatttaggaagatcacttcagatttttggaagatggatcaaaggagttgagattaactaggagtgcaaaatgattagggcctgaaggaaggcagtaccagtgagtatgaagaggaagctaaatttgaaatattcaggaggaatgaacaggacttggtgactgttgatttgcagttgagtgggtgatctctcctatgactttgcatctaaataggatattacaggcgggtcacagtggctcgtgccctgtaatcccagcactttgagaggctgaggcgagaggattgctcgagctcaggagtttaaggccatcctaggcaacacagggagaccctgtctctacaaaaaatttaaaaattagccagatgtgatggtccctgcagtcccagctactcaggagactgaggtgggaggatcacttgagcctcggaggtggaggctgcagtgagctgtgatcacactactactacactccagcctgggcaacatagccagactctgcctcataaaagaatgaatgggctgggtgtggtggctcatgtctgtaattccagcactttgggaagctgaggtgggcagatcacctgaggtcaggagttcgagaccagcctggccaacatggtgaaacctcgtctctactaaaaatacaaaaaattacccaggcgtggtggtgggtgcctttagtccagctatgcaggtggctgaaacaggagaatcacttgaattcaggaggcagaggttgcagtgagccgagattgcaccactgcactccagcctgggtgacagagtgaaactccatctcaaaaaaaaaaaaaaagaaagaaagaaaaagaaaaaagaatgaatgaatgaatgaataggatattacaacataaaatgggagagtggggttttgtggaaggactggagttttgtaagggataactgaaatgaaacacttttttccctctctagtagaagggtagtattcattttagaacagctccattacttattttggtgtgcacaggagtttgtagatggagacctacagtggtatggtaactatttttttaagcaggcagataagtcaaacttttggtttatcttttgtttatcatggtgaaagctaagtctccaaatggttgtttttgtttccacagcaaagacctgtgaacctctgaactgagtgggaattagtggtatgaaagaagaaaagacaggcccttcctactcctttcagggtttatgtagttatttatttaccgacatgtgtgcagaaagccaaatcggtactttttgtgaaatggaatatagtttagattcaaaggattttatcaagcttaaagctaaccctgtttttgctttggcctgtgttctgctgtaataatctccttccttgtgcacaggataacagtgggggggatccttaaactggcaggggtattatttagccacccaggccttcttcaatcacactgagagtcctggttcttggctatgagaatgtctcctcatgaggctcaaggactatgtgcataggattgaaaacttctagaaaaggcaaaacaaattctccaggctttgtgattggcattgtctggagtcctcaccctgaacggtcattaagaaacccaaattataccctttatgctgaaaggaagcttttctcttcagctagccaaaatttagtcgtctgcttatgccaactcccgatttcctgttactataaatccttgacagtttagaatgaagaatggtggtgtgtagggcagagaatccttgttcaaatgaatagcagagcaatggcagtataccccttgggtcatatataataaaactacaggataggtttcttgcccttgaaatctcattgtaatagtgctgtgagccaccaagagtttccgccattctagttttcaggttgtgttcaggaaccattaatactttcgcaataacacaagttcttgttcatccagggatgtttatttcagcgttaaattgtaagtaaacaagcatgctacaatttatgaaagctgagtatgtgacctctgttcagtgtcaggatgaaatcaaacgctcataatctgacaccttgaatgatttgcgtgatcattgttgtactgcatgattattaggtaaacagtttatgtaagtaactataattagttataatttttacatggccaaatcaaatgttcacagtttcttgtttatttatttgttggttctccagcatctgtaattagcatcactgtcagcatttttcattgatacctgtgtagactgtgtcctcatcacttgctggttaccttatgttaaaaaaccaagtctaggttttctccctagcagtcctttagaagggacgggtggtcctcggctctattctctctcactatccaacctcaacctcagtagggtcttcagggagtaggagctccagaccctgggaccgtgtggcctgcccagaggttcaacagcacactgttgggatgagagagaggccccttcacctctgagaaggaatgaacaacagattttattttagagtactgtatagattgaaataactgaacatttctcacctaacagatagtaaggatttcaatagacatttatttgcagaattagttttctaccacaaagtcgattggggttagaaaaaggggtgcactagtagggattctttgatactgtggttagatggtcattgaaaagaaaatgatacattttggatggattgaaaagcgaaattgattttggatgacatttttgactggcttttgtgtatttgtgtggcatgcagcagtgaatggctgtgtttggtggttagatgcagaacatttcttgtggttctgctggctgtgtgtgtattgcctgttttgattgtggttaacctgactcaccatttggttccttaaggttgagtttcctttcctgtcctttatgaacatcgtcaccttgttcaaaagggaactttatcctttcttttcaaacgtttactgagtttctgttctgtgttaggccctgtgttaggagccaggtacagaaagatgatcaaatatcttgactttaaataatacctttcacatttacctctttaatctcaggtagccctaacaaccctgtaaaattgaaaaaggttgttcatgtaccccccaatataaataactagtcacagagaaatgaacagacttcaggttacacattgtaatagtgactgagctgaagccttagtgttttgaccccacccctacccattcactagttaggagagtctaaataaagtagggttgtttgtttgtttgtgacagggttttgctgtgttgcctaggttggagtacagtggcatgatcatagccctctgcagccttgacttcccaggctcaagcaatcctctggcctcagcatcctgagtagctaggaccacaggcatgtgccactatgcccagctaattattttagtttttgtagagacaacagggtttcaaacgcatgagctcaagtgattctcccgccttggcctctcaaagtgctaagattacaggcatgagttaccatgcctggcctaaacaaaatagtttgttgttgttgttgttgttgttgttgttgtttttgagacagagttttgctctgttgcccaggctggagtacagtggtacaatcttggctcataacctccgcctccctggtttaagtgtttctcatgcctcagcctcccaagaactgggactataggcgtgcaccaccacacccagctaatttttgtatttttagtagagatggggtttcaccatgttggccacactggaagtgatctgcccacctcagcttcacaaagtgctgggattacaggtgtaagtcactgtgcccagccaataaagtaattttttcttttgagatggagtctcgctctgttgcccaggctggagtgcagtggcgtgatcttggctcactgcaagctccgcctctcaggctcatgtcattctcccgcctcagcctcccgagtagctgggactacaggtgcctgccaccacgcccagctaattttgtttttgtatttttagtagagactgggtttcaacatgttagccaggatggtctcgatctcctgacctcgtgatctgcccgccttggcctcccaaagtgctgggattacaggtgtgagccaccttacccagccaatagtttttgaatctaaaattgatcaatcaggaagcatgacatctacccaaagaaatttatgtagacatttaaaaaattcatacaaatgattcttacactgggctattttatttttaaaaaatcattaaaaacattagaatttaaacaatattaattaaggactcattgtttgcccaataaaaataatcgtcacttcgtaaatcaccctaatgaacgatttagtcatcataatttgatttagtgttttcaggacgacattgttcagtgtatttttttattggtttggaaggtagtgagtaagatatttctaagggcaaaaaggaaacagttttgaaaattcttagctaatactgagttggccaggatgggtgaaacagagttaaaggaatgtgttggccccttttcttgtgcacctagaaatcctccagggcccagtaaccattttaggtttattttattaaaaaacaggcctttgggcttcctgtgttattgattcttcagtttctgcagaacttagaaggaaaatttaccccaagtaaagtgagaagagcattaacattgtaccatggatgcctaaaatggtatttattagacacaggcctgttcaaaggctctgagtgtgggagcaggggcagcagtaaagttgtctcttcctggtggtcttataagagcttctgggagcagcagtcagagggcagagctgacctgctgtgcttaagagaacgtggactttgaggccttgccaaactgaggtgattgttccaccttgggcaaattatttaatgtatctgatttctttcagctataaaatggggttatattttattctaaaatggaattttgcctatcgtatatatagaagaccattctgtttgaagtaggaagtattagctagctcatcacttatattcatttccagggtcatttgaagtctatctacctgacgagaatataaatcccatcagggctaaggccatgtctgtttgtttttctcactatgtctccttgcccctaggtcagtgccatgggcttggtaggtactcagatatctggcaagtgaaggagtccccgtaattagtactgcagctgtcgggaaaaagtgtagacttgccgcctataagcacaggtctgtatttgtcaacatcttagagctttaggcctatgtaggttttttgttgttgttttgttttttaagagacagggtcttgctctgacacctaggctagtgagcctcctgccccaacctcccgagtagctaggactacaggtgagtaccaccgcactcgactaatttttaaattttttctagagatggggtcttactgtgctgcccaggctggtcttaaactcctgggcttaagcagtcctcctgcatcagcctcccaaagggcagggattacaggcatgctgtatctttgtttttttttcttttggttagcaagtaacagtttgggtttttatattcccaagatgtctagaggatttctttcttctacttcagcttgattgatgaaaatgtcataatgaagtgaaagaaaaggcttgctgtacttccattttgaggtggaccatcatgtttttgaagccttgttctctgagccactctattttgtttggggttcactcctagtttaaggcagagctggtactctttgttcccatcttctcagagaaagtatttggtttcaggtcagagctgttttccttttagccacctaaaagcctctgaagaatttggaggtaaagaggcttcatgtctggatctttttttttttttttttttttttggagatggagtcttgctctgttgcccaggctggagtgcagtggtgcaatctcggctcactgcaacctccacctcccgggtacaagcagttcttctgtctcagcctcccgagtagctgagactacaggtgcatgccactaggcctggctaatttttatatttttagtagagatgaggcttcaccatattggtcagggtggtctcgaactcttggccgcaggtgatccatctgcctcggcctcctaaagtgctgggattacaggcatgagccactgcgcccagcccatgtctgcatcttacttgttaacacgctgaggaaagtctggacatggagatttatggaggatgagaccaagtctcaaccacagtatacttttcaacaaatattgctaattggagttaaagtgttcgttaatgtgaaaataaaattactttggattgagactgctgctggagactgctgtagaagaaaaattagacaaaatgctctctataaagcctctattttaagaagaatgattcagagaggaacataggtccaagaaattttcatcaacaaatgaaaactgaactgccaggtttgccagatgtcttattttaaggaaatttttcctcatttggtctcttgtaaaagtcttccttttgcctctgaaatataccctgtccctatgtaacttaaaaataaaattttcagagtgttcaaagttccttctgtgtaggatttgtaattctgtgtaattcagctgggaattgtattgcataaaaataaaggcaaaaaataaccacattgttggattacagagttttgggaaatttccttaatttatttagtatagtccatcgtggtctgtcactcagcatttgttgagtgcctgctgtgaacagacaccgctacttgttctttaaggcggcagcaatgtgccttaatgtggttgtcctcattaatgttctaccctatggtcgtcctaccttacatggtataatagagtagaatggctgatatttaagggagggcctctcccctttatttagacacacaagtcctgggcatctctcttttggggacaacataaaacacccctgcctagtcctttatttggtccaccactaatcctatcccagcatcctgtgtaggcctccatggggcctacatactctgtcaggggaagagccaggagagaaggaagaaggctttgaagagccagccccagcagcctgctgacagttttccttctctccccactgtggaaggactgactaccagtggagaggtggcagcaggcttttggctaagtggagaggctctctcttcctgtgtagtttgtggagaggcagcgttgactcaaggtacagttagaagtcagcgatgctttcttttgggactttccatgttgatgacctcttctctttaagtcaaaccaagctccgctgccccacagtgttccaaattacttatcaaaattcctatgaccactgtgtagctagattcaacttgatgttataaaaccagtttttgtaagataatctgtattaaagtgcaagtgaaatggcactctgttaaactaacctgaaatctgatgatgtgctgtgggaaaagagctgtttgaatagaggttctttgcttccttccagctgggtggacaggaaagacatcctgtccctacagaactgactgccactgctccatatgtcctccatgctcactggcctcttctccggacctaagacccgaaggcctatggcccagatgggtctcacctctccaagcatggctgcccagcttagggaattatagatgtttctgttctggccaaggaggagctgagagtgggggctgataagcagcttccagaactctgggattgtacaatccctggagagaggaggagactgtctcttgttaccagctgccctcctttcacctggtagtatacagcctcttcctaaagagccttactcaacccccctcactttttctgtctcagactcactccagaaatgtgttttctgttccttgttctgccctctctgccgtgttctaccctctctgccgtgttcctaggaccagaccctgctagttccttctagaaactgattttacccatgattgaaaccaaagccttaagattctgtgggtgtggaacaccttctggttgaaaaccaaaggctgtagaattccatgcagatgtggattgttgattccattttgaaggtaggtgtgatgtgggagaagtcgtgtgtgtagtggttcggagtatggtttctggagccagttggcctaggttcaaatgccagctctccacttagtggtaagttaaacttcctgtgctacagttttctcacttccaaaatgggggtggtaatagtatctacatacacagtcaccatgagggtcaaaggaaataatacaaatgaagatgttccaaacagcacctggcacgtggtatgtgcttattaaatgctagctttataactattctgcgagtgaagctacggggctgatcaaatggctgccaccaagctcatccccagtgcatgtctatgcattctatgtagaaaatcacgatgaagaaaagaaggcagcagaaggtatctcaggatcggttccatcagaagttacgacgttgagcatattgtctcaagatctccttaaggatggctactaaatctgtttcctgaattgtattgtctcattaaaagtattgtttccttctgatctgttgaagcaaaaagctgacaacacacatgaaattttttttttaacggaacaccatgtaactatagcatattgactgtgactttggttactgttacattttgagctttatatacactttattttttttatttaattttttattgagacagggtctcgctctgtcacctaggctggagtgcagtggcgccatcttggctcactgcaacacccgcctcccgggttcaagcgattctcccacctcagcctcccaagtagctgggattacaggcgcctgccaccatgcccggctaatttttgtatttttagtagagacacggtttcaccatgttggccaggctggtctcaaacttctgacctcaggtgatccacctgccttggcctcccaaagtgctgggattacaggcatgagtgctgctcccagccttatatacactttaaaagacttgatcctgaaaaagttttagttgtggttggtaaaccacaatgtttgtagttcaaaaagctggaaaacagttccttgtgaaggttcccccaggagattgttgtttctaacagaaaattaaatactgacctggagcaccttttcagtctcctggcttgccttgagtccaaacttactgtgtctttgagacttttgcagtctggctcacttctcttcccacactgctttgcactagatgcttcaatattaatttaacaaatattaagtgccttctctgtactgggaacgatgccatttgcaattcccttgaacctgggccctactctgtcttgcatctagacctctacacatgcctctttgcctacagaacttcccatgcttcaatctttaacagcttttgggctcattttagaaaatgcagttggtggtggtgaagtgcctagactctggaggctgtgtgggttcaaatcccagctctgctacttgctagcagtatgaccttgggcaagtttcttaacctctttggttcatctttaaaatggtggtaatgatagtagctgtctaactgtgttgttctgagaattaaatgaggtaatccacagtgcacttagtatattcttagcacatagtagcttcttggcaactgttagttagctattattatcatttttatgtgtcacatcctgcaggaagtcttcccagttctgcttgagggggcccttccaaagtactcccagagggcctgttctagaactcctgtcattgcctttattatgctatattgtaatttcctgtttgcttatttctacccacttctagatggcaagctccttgaaagtaggtaaggtctgtcagccacagccatatccgcttgaagatgttagggtaggttttttgttgttgttagtttttgttttttaagagttcctaattaaattgctattgatttattgatgagtgggtctgcttgcctgttttgtcataagtaaggaggtttaaaattgtgtttccccatcttctcattagagtagttttttttgttgtttttctttctttattttttagagacaaggtcttgctatgttgcccaggctggagtgcaatggcgcaatcatagctcactgcagcctcgaacttttgcgctcaagcagtcctcctgccccagcctcttgagtggctgggactatagatgtgcaccaccatgccaggctaatttttaaattttttgtagagatgggggtcttgctctgttgcccaggctggtctcaaactcccggcttcaagaaatcctcctgccttgaccttccaaagcactgggattataggtgtgagattacacctggatagactcagccttcattaaggcagtttttaaagatgcaccaaggtgtttggaatgaagaatgctattcattaagcctactttgtgtgaggcattaagtaggctttttagatacattcttattgaatttgcctcctaactcctgtgaattgggtgctaagatacccatttaagaattatgtaaagttcctaaggagagcctagtgatattttaaaaaaagaaaagaaaaataaaagaatgatgtaaagtgctcagagtcattcggctctaacctggttctgtttggcttcatggcacataatattttcactcaccgccttgctgagcacttgttggctgactggttccctgcccaaagctgctgtcccagggccttactacctcttctctagggagctgcacaattaaacttcaaaaatgatcattaaagggattcattctttctgctggggaggtactgagttggctatggttttatattgtgcagttgcaatacttgaatagcacaaaacaatgagactatcatgcaggcagataaggattatggacaaacacaataagcattggaactttgaggagaagagagctgcatttttatagcttcatttcttcatttgtccaaaagttaaaaatagaattaattatgccccataggccacctggatttctgattgatacagaaaacttacacaacatatctaaaggatagcctatgtcaagactttctttatcaaaatatgcctttgggtcaaatcatagtctcttctgaacacattttcgtttgttttttatttttattaagcctcttccttagtggatgaacatggttttttaagcaacaaaatacacgggcttagaaagtagggtttattgtccctgtagaaagcctttagattagtaggataagctgatgagcaacttaatgtctactttctatgctaagaatcactagagttccagcctttttataacatcgctacattttaattttttatttgcatatttagaaaacaataacttggaaatgacacagtctcagatgattagcatccatctgctgagctatttctagtgcaatgggcctggtggacctacatggtaccaaaggaatcttcaccctatctggtttgtcgttagtctctcacccaagctgaggggcacaaggactgctgagaggagcttccaaatgtagcagctgatgaagactttgggtctcactttgtcatccaggctggagtgcaatggcacaatcgtagcttactgcagcctcgaactcctgggcttaagcgatcctcccactcagccttctgagtagctaggactgaggtgcacaccgccatgcccagctaactaaaaaatttttttgtagagacaggtctcgctatgttgcccaggctggtcttgaactcctggcctcaagcagttttcctgcctcagcctctcaaggtactgggactacaggtgtgagccactgcttctagccaggacatcttaattgacttccttttttttttttttttttgagatagggtctccttgtgttgggctcgaactcttgggctcaggggatcctcccacctcagattcctgagtggctgggatgacatatgtttttgaccaagactctgaatataaaagtaagaagaacacagttgcaactaaagttgcttgttcacttattatattttaagcactgtgttgatgctttacatgtaccccatgtaaagccatatgcattggcactgttatccccattttacagatgaggaaactaaggtgagagaggctgcgtaatatgtctgaggtcatagagctattgagtggatgagtcaggattcattctggcaccagaggtcacattccaagtactacattgtactgtcagggctggagattttgtaaacctaccaattcaagctattgttttcacacgttgttttggccacagacattgccttcccacctcaatgagcacacctggctttgcattttaagcagttttgcagaggtcatatctgtctttgcaggatgaagactttcctccacacaacataaaagcccttatagctctgtgactcatcctgacagacgatgagataggttctgctgtgaggttgactgtgtccctgtgagcaaacttgtgcagagaaagagagcatggaggattgaatctgggcatttcttttttttttttttttttgtgacggagtctcactctgtagccaggctggagtgcagtggcgcgatctcagctcactgcaatctccacctcctgggttcaagtgattcccctgcctcagcctgctgagtagctgggactataggcatgtaccaccacacctggctaattttttgtgttttagtagagacggggtttcacctgttggccaggatggtcttgatctcctgacattgtgatccgcccctctcggcctcccaaagtgctgggattacaggtgtgagccactgtgcccagcctccaggccatttctttagcccaggggcaaaggtaggagccatagaaggcaccacagcaaaagccagtaggagctgaagaagacgtctagaaagactacgatgcgtggtgagaggaaaggttgcccaaccgtactgagggcttcagagatcaaggagaaccaaaacagaattcagattttgtgattgaatacattgctggcctttgagattatgttccattaaagtggggaaaagtgagtgttgccttgaggggctttgcagcgaagccacgggtggggagtctgctatcaagtatagaatactgactttaaaagtttgtgttccaaggtcaggaatagttgaaataaggtaggttgagggaccttgaggccaatgaaggctttttcgtctttgggaacccggttctgaccatgtctaaagtcaacggaagaacctgatggaaagggagaaatcaaagatttctggaataatgttagtagttatcacatattgaatgcttactgtgtgccaggtacaggcagaagagcatttcctgttctatcttattcagtctgcacagcaaccctgggaagtaggtaaccagacccccttttacagatgaggaaacagaggcttagagtttaaacaacttgccaagactactattaaattgtatagttttaaactcaggtctatcaagctatatcatagatatgattgagtgagcaggttatgggggagatagagcctgagaagagaggtgcttccttcctgtgagaccagaggaaatgactcctgaattcagatggagagaggaagatggaccaactctttgacccttttctaagtgcatgtattgtgcccaatatctggctcattgctcaggaccgctccccatggcctctcactgctgcatactcaaagagccagcaaactgtttgcagaatgtctacacttttttctgatggccaagtcgtcttacagaggcaggggctccagaaatctagaggaggttgcaaaaaaattagctgtatggacagtggatacactgggaatgttggcttggccccatggcctcccaggatctattgcacttgacatagaatagagggggctttttcgtgtgtgtgtgtgtgtgtgtgtgtgtgtgtgtgtgtgtatttttcttttcccctgtatttgtgggtgttaatatgaaccatccagccaggtctgtgacggctgagaagttggtcagggtgtggtttttaaatacattttcctttaggttttctttcaactatcttcaagtttcttgttatgatgcatttataggttccagagacctgaatgttatagccctcagttgtcattatagtcctcataaaaaagttgaagatttgtatacattctctactccaaaagcctctgcagtggtgagcatagctagctgccttccaaaaagtttctacaaaggcattttcctgtttttctcagcctttaaccctatctaaaggagacattctttggggtaactggtttagtttaagtttctcatttccctgcagcactactgtttctgtaggtggtttggcaaccattggcacagggtcttttgaatttccaaatcggtgactcctgccatttcaagaaaatctgtctgaaatgacaaaggacctcctttgtcctttgaggaagagacaaaatgactggagaaacaaaggcagaggaatctgttagtgtatttattcattgtttacaaattagaacaagcatcggaatattcaagattcctgatttcaggagtcctttttgaaatttttttgaggcagggtcttgctctgccacccaggctggagtgcagtgtgccatcttggctcactgcaacctcagactccccgggcttgagtgatccacttgcctcagcctcccgaagtgctgggattataggcgtgagccaccacgcctggccgatttcaggagtcttaattgcctctactatcactttttttcccctgcctaattatatagatcttttgcctctttattgttgaagactaattttttaaaacaggcaactcagcagttactgtaatatttatttctactgggcttttcaagtgttcttatatttcttccttgaattaatttacaaggagacttaattcaccttactggtctgtattagccgtagtttcatattaacatcttgtttttttaggtttgactatcttagtaggctttttctttctttcctgtcctctgtaaatgattaattaaaagtctttttgttttgggcattctataaatgctcttttagtacagttttctcccttaagtggtgtcattcctctccacagtctctgcccatagaatggctttcctcaagtcctatgtggcagatgacatcaagggtgaggggaaggagagtctggttgggccctggctgtgagcagcaaatgagcatgtcattgggccttggggcaaaggccttcaatgctctgtacgtgagaggagcataaactgttggacccggggtaagtgagtagccgacttagaacctttctagagaaatagctgagaaagcctgaaagaggcttaaatgacaagacatggaggaagagcctccttgccaggaattggagaatctagttcagggaaactttgtccatagaaccctgagaatggtgtatggggtatgagggaaaaatagttttagcctgatactgggtgcggagagggatactctgtgggattcagacccaaaggagctttctttagttattttggagaagtgattctcagccagggcaattttggcaccttccccatccccttctcaccccaggacattggcaatgtccagagatgtttttggttgtcatacttagtggggtgctactggcatctagtgaatagagaccagggatgctataaatttcatacagcatacaaaggcagcctcccatgaccaagaattatctgactaaaaatgtcagtaggcggaggttgagaaattctcctttagagagtcttgaggaattttcatcaggaatggaattcaagttaggaagtaaaactagaggaggctgtaaaaggctcaggtcttgttatatgtgttaacctgtcctaggccaatgtgaagtaaaattataactaggactggatttgtgtagttccctctgtggtatggtttgtattttctgatgatgacaaattatagtaaagaagctttgacattcccagctatgggtgtgccaccgtgcagaggacacaggtgaaggatgctcacctgtgagaagggcagggcctgctggggtcttggactttcaggggcaaacctccattctctgggtggcagcagcatgggaaattttcctgtggtagctgagaaactgtgagggccacctgaggcttccctggaccattcatgcctgtgatggggtgtgtttaagggagaaagagaatccttcagattctcttcttcatagagttcccaaaatggaaacttttgtatttggtgaccccttctgacttgtcatgcagctaattcgaataccttaaaacaagaatttctcattgtagaatccttgacccctgggctgtggactttgaggtgcaaagtatgcagacaaagacagacaaagtgtggtctgtctctgtgcttgaggtagatttttatattggaacacttacattaggtagatgttatttaaaaggtgcaatggctcattgcagccttgttaacactggtgcccctcactcttccaggaggagaaaagctcttttttcatttgctgctgagcaccagagccagtccctgattgggggcttgagcttgcttcctgtcatcagttacagaatattagatagtgtgcaactttggggcttggctgtggggaatgtaagtgactcagtagcatggatgctggtactgagtcacttacaattatggtacagtatgaagtagtttataattatttagtggttaggtgtgtggctctgacaccaggttgaattctggctccaggatttcctgctgtgtgaccttgggccagttaacctatctgtgcctcagtttgtccatttgtgaaatgagaataattccatcagatagttgtaaggattaaataattgtagaacactttgaatggtacctggtatatacagagtactaaatcatattacgtaaaatggtgtggtgcagagtataagtgctggaggaattcagaaatggagaaggtaagttgagggatgtgtggtcaggagaggctttcttggtggggcttgaaatgggttgaagatttgagtcaggctctaagagaacaatagtagatggtgttccagacaaggggacaatgtgcataaggacgcagaagaaattgttatgtcctagactctgtaaggaaactgactagggtaatgggaaactagattgagtatgtgattttggggatgggaggtgagggatattgataaatgggcactaaagattagtttttatacaggggcaccagatgctcatttgggccactagggatttctgagctgtgaaatgaccaaaggaacttgaagttcaagcagatgagtcaagtgtggattttcagggtgggctgaagtgaggagctgtggcacgggtcggaaagccagccaggaagccgttctgatagttcacctcattggagctggactaagtgacagccttgggcataaagaggcaggtgtaagtcttggtattgttttgaaacagtactgtaatgtacaggatttgatgactgatggaggtgcaagggagacaagtgcaaggtgacctgagcctctaatcctgcctgaatggctgtgtaaaaaactggtcagagggaggagagtgggcaggaggagctggttaagggaaggtttagtgtaaacaggagagcagttcctcacccaccccttacaaccaagaggagcccattttccaaactgagatggcttcttttgggctgcagtttgaatccaggagcagtaggcaaggctggcattttccccattcattcacagggtatccagctccacctggtccacttgatgcagaccccacatgcggtactggcttcttagtggctactattcaaccttactgccagctccctctgatcctcttgagccaaaggcttttcagagtgtccagtgggacttgggcttcaaacctgttttcccttcataaggaagcctgtaaatcttgatggagattgggaatattgtcttcccatctctgtatgcatgaaccacagacttctgctatttccaatctctgcgtagccctcctgcttagaagacacagcacagtggaagaagagagcagccttttacagccccaggcctcacaggatcctctgaaaagactcggagcttcatgctcagaatcaccctgtcaggagcactctgtcacggaaggctgtaattttaggataagaaagagccctggtttcccccaggccaaggctttatcccaaactcccaagtaaaagcattatcacagcagggtggattgagttaaggaccttatccatgtttgctttgtctcaattatttttagaggagtctttttttttttctcttttttgctcactgctttgtgtcccacactgttctaatactttccatttaatctctgattttcacaacccacccctattaggagggtagagtgttactctgttttgcagatgaggaaattgaggcacagcacagttaagtttgcctggagttgcacatctggttattggcgtggctgggatttgaatcctggcaggggattctggggtgtctgctcactcactgtgtttcaccatctcccttcagttagccagagctgccattttcaaggtggcattttctttttcctcttttgagttctaatgaagaagttgttttaggaaagtcacatggtaacataagagggagcaggtgcttttttgagtcccatgggcctggtttgaacactggctgtgcccacttatactagctatgcacctttgggcaagtctgttcacctctttaagcctcagtttcttagaaatctcagaaatctgtttactaaagatattatggaaaagtgagcaggtatatgtttagtggctgtgaggtttggggttagttatttaaccttttctataaggtgaagatgctaatgcataccttcataaaggctttactataaagcacttcgaatgagatctggaatggagtaagtaaggaatgagtactgttggtactagcaggctttcaatactttttttgtatgtggtggtagtaatggtttcatttggtcctttttggttacattttatgtacttttgactcttataagcaaaagtaccttgcatggtaggagttgataagattataatagacgaatgaataaatgtattccacccatgtttgatttccctgtttagcagtatctgcctggaaaagctcccatcattctcgatcatatttgcagatatgctagatggggaacttggcttgctttccattcacctgtgccgttcacgtgtctctagtttggcatacagatatctattctagtggtgcagttttgtttttcatcaatgtcatttggaatacttagcaatctgccactttgcttagattttttggttcttatttctttatccttttgaaatactctacctttttattgtaaagaccatcctgattaaccatgacttttaaattatgaagattcataatcacactgctaaaaagtgccttttccattaggtctttcctttctttccttctctttctttctttctcttcctccccttctccttcccctccccctcccccttccccttttccttcctccttctctctctctctttctctttctttctttctctctttctttctctttctctctctttctgtctctttctctgtgtgtttgttttgctttgttgcttcctatccttcattgcttaggccttactttctatcctacttatttcccctatagtcctggcttattctccacattcctgctctatgacatctgaaattcatgaatgggatttttctttttagttatctttcatcgatagctgttacctttcccccttggattccagaagatcgttttactaaataaaaggttttggtcttcatcctgttatgccaatgggtagtttccagcacaggaagttggttttcacatctaatgggatcatctcccaatattctgaactctctccaagtctattggaatattcatcatcttgtttttaatattgacctttacacttttttcattaccttactgtggggggacttagaggtggtaggtacatctctcctgggctatgtttggaggctcagcaacataagtagatgaagcacagaaagatggaatgaggaagggaagcttcagcaggaaggaaggtgaacggattgtctatgtggtgctgccagcccaggctgtggagccttagcagaacagggttcagactcggccctgttgcacattccctgtgtgtgtgacctgggcaagctgttttattcttccaaatcccaggttgctttttgtgtaaaaaagggatgttaatgtttaccacatagagttacattagggttgagcgagatgtcctctggtgggctctggtttgtctctcctctttcctttatcttttctctctgttctgcttgtttctggcaaagccattttctctgtttttgtgcagttcctctcatggaaattatttatacttttttaaacttgggaacgttatatctcctaagaagtatcaacttgcctcgtttctgttaccacagccactgatgtagctgaggccccttcctcgcttgtaagctgctcatcagaaatgacacttcttccctgttactttggctgagggaagagttttatgcttatctcacataaagtctttttttttttttttgagaaggagtgtggctcttgttgcccaggctggagcgcaatgcaagatctcagctcactacaacctctgccccctgggttcaagcgattctcccgcctcagcctcctgagtaggtgggattacaggcatgcaccaccatgcctggctaatatttttgtgtttttagtagagacagggtttctccatgttggtcaggctggtcttgaactcccgacctcaggtgatccgcccgcctcagcctcccaaggctgttttcttttttttttttttgagaaagtgtttcactctgtcacccaggctggagtacagtggtgcgatctcagctcactgcaaccttcgcctcccaggctcaagcgattctcctgcctcagcctcctgagtagctggaattataggcactcaccaccacacctggctaatttttgtattttttagtagagatggggtttcactatgttggccaggctgatctcgaactcctgacctcaggtgatccacccaccttgacctcccaaagtgctgggattacaggagtgagccaccgtgcccagcctaaggctgttttcaatattggaccttttatgccttcttagctttgagagttctcagaagcaagttttatttttgcatagaggacccctactctctccccttctgctttttttactctctacaaatggcattacttcatggagccacaatcttaggtggtttttaaatcttcaaaaagctaggagactcaaaatggttagaggagggaaattgctgtactttttcttccaaccagtctagggcaagggaggaagcccaatttgtgtagcactctttccttcatggaggataccccctataatctaggtgcaagtctgggaaaattcatgctcagatgaacacataggttggctcattaaataacacccgtttctgtgaaggacacttgcagagagctaaaaggcaggaaagttggtgagtaagaagtacaaaacagtagattaataaacgtgtgattattcctttcagtattcagaatttaatgagcatatattacagatacaaatctgtatcttaaaatagttgatagcctctagagaagggatggggtggactgttaggtgctgaggccagtggccaatggccagttggatggccttgaggtggttctgacaaattttaaggtacagagattggaggacctggcacaggagtaagcctgacttcagttcgagcctcaaatctgccttggacagagtaatttttctcttttaaccatattggtttttgttttgttttgtttttgttttttgttttgagatggagtctggctctgttgcccaggctggagtacagtggtgtgcgtctcagctcactgcaacctcggcctcccgggttcaagcaattctcctgcctcagcctgccgagtaactcggattacaggcacccaccaccgcccctggctatttatatttttaacagagatagggtttcaccgtgttggccaggctggtcttgaactcctcaggcgatccgcctgaggatctggagtgcagtggtgcgatcttgactcactgcaatctccgcctcccaagttcaagagattctcctgcctcagcctcctgagtagctgggattacaagcgtgcatcaccacacctggctaatttttgtatttttagcagagatgaggtttcaccatgttggccaggctggtcttaaactcctgacctcaagtgatctatccgtctcaacctcccaaagtgctgggattacaggcatgagccaccatgcccagcagttcttcttttttattgccaaataatattccattgtatgagtataccatatgttcatccattcatcagttaatggaaatttatgttgtttccatattttggtttttgtgaatgatgctactttgaacatccatatacaaagttttgtgtagacctatgctttcatttctcttggagtgaattgctgagttatatgttaactctgtttaactttttgaggacctgctatattgtttttcaaagtggctgtatcattttacaatcccaccagaaatgtatgagtgttccaatttctccatatactcactgacatttgttattgtccattttattttatcctagtggatataaagtgatttttgatttgtctttccctcatgactattactattgaacatccttctgtgtgcttattagccatttgtgtatcttctttggaaagatgatttttcaaatcatttggacatctttgaattgggttacttgcctttctgttgttgagttgtatgagtagttcctctttggaagttttatttggcagtctggaattcaaatttatgtccgtgatcattctatcactacttttgtggacgaaatgtctttggcgaaatagattttttttgacacttgctattagtaatggaagcatagaaagattttaaatgcatagaatgatggagaaaaggctgttttgttttgtttttgagatggagtttcgctcttgttgcccaggctggagtgcaatggcgcgatctcgtctcactgcaaccaccgcctcctggattcaagcgattctcctgcctcagcctcccaagtagctgggattacaggcatgggccaccacgcccggctagttttgtatttttagtagagacggggtttctccatgttggtcaggctagttgcaaactcccgaccttaggtgatccgcccgcctcagcctcccaaagggaaaaggctgtttttaaataaatttatacatggaaaaactgtaacagtgttttggaagcaactgcccttccttcaaacagttgacttccttggatagcataccagtgttctagtttcttccaacccttttgttgctttgactgacatcttccaaaagaattgtcagggctaatgcctttgaaaaaatactaacaaattagatggaattaatgcaattaaacattatttttatttgagagtcttgtggctttctttgaatacggcagtcaatagctgatattttagggctgctgttcagaaattgtggacctaaaccaagataccatggtgttaggaggaatgaaatggagacgggagaagaatggaagaaacagccagataactgtgtacgttggagaattaaaagctttgttttttctcttatactccatacaaattaaagcattttccagagaggtgatgtggaaggaagccctcaatttagttccccaggcactttatttttatttatttatttatttatttattttggagacggagtcttgctttgtcacccaggctgaagtgcagtggcccagtctcggctcactgcaagctccacctcccgggttcacgccattctcctgcctcagcctccggagcagctgggactacaggcgcccaccaccatgcccggctaatttttttgtatttttagtagagatggggtttcactgtgttagccaggacggtctctatctcctgaccttgtgatccgcccgcctcggcctcccaaagtgctgggattacaggcgtgagccaccacgcccagccacccccaggtactttataacactaggtgaaattggttttttagtcactgaagtcttttgagcttgccaagagcttggttagctttaaatcattttggcattactctaggaccctgtctggttattatcagttttctcatttgaagttacatatcattcagcggtcatgcttacatccgtttccctggaatctcatgcaagaagaaaaaaatccttgcttcatagtaagtgttggaaagtgggcgtcgtgacaagttggctctgacccagcttcccttgctcttacacatgtgaaacctgtttcttttggctagggccaagaacctgtcgacatctcagctaaaacaatctagtcttattcccctctcttttcacctcccaccccacccccagcctatttttctccttttccttcacattttattttataaggctgttgtgggtcactttttctagttatttcaaacattggattcttcaggtgtcttctttcatttgtttttattttccttcttagaacagtggccatgtgaagccattcatatttactctaatgtaagaaaatcattttgagttttgtctgctggacatgcttaggagatttaactctgttttcattcttctggacagtgataggctggttccctcttgttttttaaagacagtttcttgatgtgtcgcttaggctggagtgcagtggtgtgatcatagttcactggaacctccaacaactgggcttaagccatcctcccaccttagcctcctcagtagctgggactacaggcatgcattgccacacctagctaacttttgaaatttttgtagagacggggtctcgccgtgtttcccaggctggtctcaaactcctgggctcaagcattccttccacctcagcctcccaaagtgctgggattacaggcgtgagccacttggcctggctggtttacattttttaatgcccgtcttcagagtcaaaactgggattgccctggtgttagtttgcattaaaaattgctgatatgagatttatgcagagctgggacttgctgatattgttggactttgtcatctgtacttgaaatatgagaaagggaactgcttaaaatatctgggctccctttccggtagctttagttgtttcccatctttaaaccaaatgctgaaggcataacataaattaatgtattgctaaaggccgagtggataaaatacacaacagctttataatattaaaagcttcattggtacttaacgtgttcagctgccagctgcataaggagaaccttgaaagaaagagggtacaaattacttatttaaaatactttctcctggtgggccgggcgcggtggctcacgcctgtaatcccagcactttgggaggccgaggcgggcggatcacgaggtcaggagatcgagaccatcccggctaaaacggtgaaaccccgtctctactaaaaatacaaaaaattagccgggcgtagtggcgggcgcctgtagtcccagctacttgggaggctgaggcaggagaatggcgtgaacccgggaggcggagcttgcagtgagccgagatcccgccactgcactccagcctgggcgacagagcgagactccgtctcaaaaaaaaaaaaaaaaaaaaaaaaatactttctcctggtgaagtggtggtgagattagcatgtccctagttgctggtaagggaatttcaggaacttgttttagagtgcagagaaccccctgatctgtagtgtgcattgaaagagtacacattatgccaaccagctcttaccttcaatggagaaattcaggccagggcagcagcagaagtagaaagacctccactgtcactgaggtagagactctgaagggcgcgagattctgattgtgcctgtcctcacagtggagggaggcctttggagggccttttttgcctttgtagcaggcgggaacactcaggtctgtgactgtcaagcggaagctggtgaaggtcctccaactgtagatggctcaggatatagtactgaggtcattatctttagattttctatattccttccaggctgagggaaacatgtccagtcttctttcaacagttcatttgcttccattgccaggccttttatgagaatgttctagtgcttagaatatgtttccttccttaatggtcaaagtgctaccatatttttaaacacaccctgggtttctaattcctacaagaaggctctaatacatgataatggcggtgatagctcccaaggatattcggtttcctcacttttcattcactccatctccaacatgtacaggatgaatggcccctttgctgataattcatgtgaaatatattccccgtgacacctagatgagcaaatttattgggagctaaaattctataagaaactacttttatttcaaaaataaagcttaaaactgatatgtagcttcatctattcagcaaacatttgatccggtatctactatgctggatacctagcagatacaaagatgaatctcatgtaggtggaccttgatctcaagaggcttagagtctagaaagatacatacatgttacatacatacatatacattcctatacatacatacatattacatcctttttactctattaaacaggtaaaatgcaaggggaattcagaggagagaagatagtcattttggatgtgtagtgctgaaaggcagactgacattatggctttgggctctggagtcagaatgcttggattctggtggggcgcagtggcacagccctgtaatcccagcactttgggaggtaggggcaggcggatcacttgaactcaggagtttgagaccagcctgtgcaacattgcgagacctcatcttaaaaaaatatatatatatatatttttttaaaaagaatggctggattcaaatcctgttttagaatttattatcttagggcccttgtatgattattttacttctctaagactgtttcctcatctggtaaatggagataataagtacctatttcacagggtaattgtgaggcttaaacaatgtaatgtaggtaaggcccttactgtggaaggaagatcagacatgctattgtggaggctgcggcctttgaaggaggaggagaattgaggcatgggacagtggggagaaaggtgaggaaggcagaagaaactgtgctggtttagagaatggctaaattttgctgaatcaatggggtataaaggagagataaagatagtaagatcagaaaaaagaagttgtggctggttcacacaaggcatgaaatccttcattgggttgttttgacctcatctcaagattgaaggatgccaccgaaggttttagagtgggcaagtaataatcagactctggcattaggagaattaatctacagtgtctatagtgggaaaacttattaggacaaaatcagttacacctcatagcctttactgctccctaacttggtctgatttatatcatggacactttcttttgtcattgaatttcctagcatatgattttaaatgatgcttccacagcttctcccaccctaccccacacctccctctgtagtgacctctcttccacttagggcacctattgacctgttcttttctccttccttccatctaagctgggaaaggtctgatatgtcatttattcataattaaataaaatgcagccaaagcaaatacattacctctcatccattttaaagcacattataagccatttatttttaattgcagtttaaaaagcttttctttataagaatttcaggcatcaagcaaattgggaacaatccttttatgcctattcaactggccctaaaaaatcaatcttatttaggcttttttggaataagagagcaggaggagtctccaatatcctcctcaaagacagctgtcctctcctttgaggaatggagtgaaattgctctgtagaaaaggctgtgtcattgcccctgccctggcacaaatcagtctgttccttatgtacatacacttctgcccctcagtggataaatgtgtgtgtgtgtcacgtgccactagtggccatggctctgtgccatgcacataaccgaacacactcattcttccatccctcccccaagaagcctattttggtcaaatttgaacttttactttttacttaagttttatttgttttctgattctgggatacccagaaatggtccccacgttgcttttgtttgtttgtcttctcctctctgagtttgaaagagtcttataaaacaagtatttctgggccgggcatggtggctcacgcctgtaatcccagcactttgggaggccaaggcaggtggatcatgaagtcaggagttcaagaccagcctggccaacatggtgaaaccccatctctacaaaaactacaaaaatttgccgggcgtggtggcgcacgcctgtaatcccacctacgcggacggctgaggcaggagaattgcttgaacccgggaggtggaggttacagtgagctgagatctcgccactgtgctccagcctgggcgacagagcgagactccatcttggaaaaacaaacaaacaaaaccaagtatttctttgaaactcatctcataagtagttgcaaaattggagtattacttgactgtcctaataattatgaattttctaaaaatatttgattttagattacttaaggcttagagcactgattttaggttcttttggaggtagcatttaaggagtataagggagccaattaaagaataccttctttattgtctctgttctaggagcccttccctacagggccaggccctttacctcacaggttggagcagatcagaatgcacacctcctgtggacagggcaatggaacccctccagcagcctcactggagtgatttcacaagtcttctcaataaatttacttaatttgatcctgtgtatttcatcaggtttgtggagtttgcctgcagatcttgttgattcagtgggcatcttagttgtggtatgcattcagtaaatatttttattgtgaacaagtgcagtttgttttagcaatattataatatacactatggtgaagtaattagttgccttctgctatttgctttcaagtaatcggaaataagaagtatttggggccaggcacagtggcttatgcctgtaatcccagcactttggaaggctgaggtggttggattgcttgagcccaggagttccaggttacaatgagctatgatcgtgccactgcactccagcctagatgacagagtgagatcctgtctctttcaaaaaaaaaaagaaaaggtttggggatatgctaaggagacttaatgcttttcatttacagcattcccttggtatttgttaatggctgttctgcttagaaatagctgcagagtagatgatggtgcaaaaaatcagccatagtggcttgaagatttcaggaatattttctacttctgtggctttttcacatcctgttcatctaagaaatatggttgctgctcccagccattgtgggcagtggctttgggggaagcgctatagtgtgagcacaatgaattttggtcatcttggtcctggttagatggcctataatgctctcatttccagagttggtttctcagagactgttcacttgtctttcaggccaagaatagttacaagataagcagtggatttaaaaacagagtgtattttgcactgtctgatgagtacattgtgtctccgaagttgagattccacatagtgagccttggaaaacaactgctggtaaattcggaagataaagaaaagattaattatacactccttatcttgcggagcactttgtgttgactgatgtagttcactgacccgaagatggaaccaggaaacctggaatgtgatgttttacattgtttctgttgaaaaatgtacttaaccaatgtgcagagtgttcagggcaatatacttggaatgacctttgtccttgaggcacttgtgggaatctgcttgtgacacacctaacaaggatgagaatttggaggaaaaacagaaatgagagatgatttaattttcatcagtccatatactggagaaatattttttctaatgattcttagatatcttttctatatgttggatataaaattaagtgaaccaagattagtagtgctattgagtctaacttttctaagacaaaagtattatttaaaaattattaaaatattggctcacacttataatcccagcactttgggaggccaaggcaggcggatcacaaggtcaggagttcgagaccagcctagccaacatgatgaaaccccgtctctactaaaatacaaaaattagctgggcgtggtggcgggtgcctgtaatcccagctacttgggaggctgaggcgggagaatcgcttgaactcagcaggcggaggttgcagtgagctgagatcatgccattgcactccatcctgggcaacgaggatgaaactctgtgtcaaaaaaaaaaaaaattaaaataatatatcctcatgataaaaaagtcaaacaatggcaacatctatagtatttctacctctaaaaaaaattttttttttgagatggagtcttgctctgtcacccaggctggagtgcagtggtgccatcttggctcactgcaactccacctcccgggttcaagtgattctcctgcctcagcctcctgagtaggtgggatcacaggcgtgtgccaccacgcccggctaatttttgtatttttagtagagacagggtttcaccatgttggtcgggctggtcttgaactcctgaccttgtgatcggcctgccttggcctcccaaagtgttgggattacaggtgtgagccaccgcgccagcctaacaattttatgtatttatttttagatttttttccatgcttatacaaatatattccatttttattttgatgatgttacataatccacaacttggctttttccgttttttttcctctgctgtgtctctaacgcttaatatattattattattttttatttttttatagagataggatttagctatgttgcctaggctggtcttgaactcctaggctcaagcaatcctcccacctcggcctcacaaagtattgggattacaggcatgagccactgtgcccgcccaaactgaatacattttgacattaattgagtttttataatgaattaatgttgaatcagcaatttttaaaaaatctaatgaacatatagcttctcttctttattctgttaatgggaacattggattctctgatgctcaacactcctgacattccttggggataactttcgtcattccttaaaattgacagccgttcattctttaaagacatttcagggatgtcacaaagcagcagaatatatgtatgacctgggctaggaaacctgagagggacatggtctaacttgtgctgggaatgtgactgacaatgtacgatgtactgttcagagccagaggaaatgatactgagatccagcacctctaggagctgttctctatgtagttgttgttattagaggtgatgctattaattagaggttaataatatcattagcctacaaagtattagattcgaagtaacattgtcctagttgtaatcttgaggattatgcatactgaggggtttgaaatgctttgactgtcttcagttttgggggtttattatgtttcatttgctttcatagttttttgaggatagcttaataatcggatgaagtttctcatacgattccccaattaaactacttgtttcttttgagcgctaggccaaaccttggccatctcttctttctttcgaggaagtgaacattttctctactttaccaactctctctagaacaactggtgaacttggcagtgtatgacagaggaattggagatttgctgtgaacagccatcacaagtagccagagcttcagtactcacttgagtttaaggtctagatttgaggttagtagcttaaatgatgtgacttactggcttctaggagctaagatggagttccagtgtttacgtttcatactccaaatctgaagagtgagtgaggtggtggatgatcactaacagtttctttgagctctgtgagattttgattttgtatgaatgcacccacttctctcagactggtcccttaattgagaactgaggtcttgcagatagggagtgtaaagttaggatcttgatttgtatgtaaattgggctgaccttgttgattcatgtcttttttcatcctgatactgatttttttttttcctcctgtgtttgggattgtgcattgtacactttcttctgtcattggtatttactcttagggagtgtgggattttttaaatagacttggtttttttagagttgtatttgttgatgttgtttcttttcttttccccctcccctccccatccttcttttcttttcttttttctcttttcttttccctttcctttccttttctttcccttccctttccttccctttccccttcccttccccctccttttcctttcccctttcccctttccttttccttttccttttcctttccttttctttctctccctctgttggccaggctggagtgtagtagtacagtcaaagctcactataacctttaactcctgggctcagggcctactcccacctcggcctcccaagtagctaggaatacaggtgtgcatcaccatgctcaggtagttttgatatgcggtcttgctcctttgcccaggctggtcttgaactcttgggctgaagtgatcattctgccttggcctcccaaagtgctgggattacaggtgtgaaccactgcatccggcctacagcagttttaggtttatagaaaaattgctcaaaaagtacagagagttcccatatacttcttctctctcccactcacacagtttcccctattattattaacaccttgcctgtgtgatactaacatctttaatgtgtggtacatttgttataattgatgagccaatattgatacgttattaactaacgttcattagggctcactctgtgtgttatatagttctatggattttgacaaatgcctcatgtcatatatctaccattatagtattaaatatcatacaaaataatttcactgcccaaagaatgccctgtgctccatctattcacctgtcttccctccccgttgaacccatggcaggcactgatcttcttaccatctctatagttttgcttttactgaaatatctagttggaatcatacagtatggagcctttccatcctggcttctttcacctaacaatatgcatttaagatttctcgaagtctttttatagctttgatactttatttctttttattcctggataataagcccattgtatgaaggacatcttggtcgcttccaagttttggcagttatgaatagagctgctataaacatttgtgtgcaagttttggtgcagacataagctcatttgggtaaatacccaggagcatgattactgaatcatatggtaagcgtatatttagctttgtaagaaactgccaaactgtcttttaaagtagacatataggctgggcgtggtggctcacgcctgtaatcccagcactttgggaggccaaggcgggcagatcatgaggtcaggagatcgagaccatcctggctaacacggtgaaaacccagtctctactaaaaatacaaaaacaaagttagccgggcatggtggtgggtgcctgtagtcccagctactcaggaggccgaggcaggagaatggcgtaaacctgggaggcggagcttgcagtgagctgagatcatgctactgcactccagcctgggcaacagcgagatgccatctcaaaaaaaaaaaagtggacatattattttgtactcccacccagcaatgaatgagagttcctgttgctccatatcctcactgtcatttggtgttatgttttggattttagccattcaaatagatatttagtggtgtcttattgtagttttaacttgcatttccctaagtgacatttgaattcgatattgagtgagtgtcttttcatatgcttatttgccacctgtacatcttctttggtgaggtgtctgttcagatcttttaaattaggttgttttcttattgttgaattttatgagttcttggtatacagtttttactcagtatccgtgggggactggttccaggactctcctgcatataccaaaatctgtgcatacccaagtttctcagtcagccccacagaatctgcacatatgaaatggtggccctctgaatatgcaggttttccatctgcaaatacggtttcgttgaaaaaaatctgcatgaaagtgaatccatacagctcaaatctgtgttgttcaagggtcagctgtattttggatatatatcctttatcagaaatgattttacaaagattttctcccagtctgtggcttgtcttttcattctcttaactgtttttcacagagcagaagtttttaattttagtaagtccagcttatcagtgttttcatggatcatgaaagtcggtgttgtacctaaatagtcatcatcaatctcaagttcacctaggttttctcctgtattatcttctagaagttttataattttgcattttacattaagatctatgatctattttattttattttattatttgaaatagggtcttactctgtcacccaggctggaatgcagtggggagaacacagcttactgcagccttgacctcccaggctcaagtgattcttctgcctcagcctcccgagtagctgggactacaggcatgcaccaccacacctggctaatttttaaaaatattttgtagaaatggagtctcccactgttgcccaggctggtctcaaactcctgggctcaagcagtcttcttgccttggctgcccacagtgctgggattacaggtgtgagccaccgcacctgaccttgatttattttaagtgaatttttatgaaaggtataaggtctgtgtctagattcactttttttgcatgtgatttccagttgttccagtaccagttgttgcaaagaccatcttatctccactgaattggcctttgctcctttgtcaaagatcagttgactatatttgtgtgggttgctttctgggctctctattctgttccactaatttatttgttcacccatcacacactgtcttcatcactatagctttatactggcatacctcatcttttattgtgcattgtagacactgagtttatttttacaaagtgaaagttgtggcaactgtgcactgattattaattattgatttaatttctttaatagatatagacctattcagataatctgttcttccttggatgaaatttggtgggattggctttcaatgattggttcatttcatagaggttgtcaaatttatgagcatatatttggctataatatttcttcattatccttttaatatctatgggatctgtagtgatggcttctctttttctttttgatattagtaatttgtgtcttctctctgtctcctcctctctttatttttatttttatttatttttttttttttttgagacagagtctcactctgtcccccaggctggagtgcagtggcatgatttcggctcactgtaacctccacctcccaggttcaagcagttctcctgcctcagcctcctgagtagctgggactacaggcgtgtgccaccacgcccagctaatttttatgtttttagtagagatggggtttcactgtgttggctggggtggtcttgaactcctgacctcagattatccacctgccttggactcccaaagtgctggaattacaggcatgagccaccgtgcccggcctctctctctttttacaaaattttggggctgggcacagtggcttatgcctgtaatcccagcactttgggaggccgaggcgggcagatcacttgaggttaggagttcaagaccagcccggccaatatggtgaaaccctgtctctactaaaaatataaatattagtcgggcatggtggtgtgtgcctttagtcccagctactcgggaggctgaggtgggagaattgcttgaacccaggaggcggagattgcagtgagccgagattgtgctactgcactccatcctgggtgacagagcaaaactctgtcttgaaaaaaaaaaaagggggggttaatctggctagatgtttatcaatttcattgattttttaaagagaaccaacttggaagtggggttttcgttcatgttatagtttataaccataatgtcttggttttgagtcagtccctaaattttcaccagtaattgctgtacctgcatatgcacaaaggtgtaagtattaggagctaatacagaaatatcaatacaactttttagagtccatagactttctaaggctttcattttcaacagaatagttttatgaaccaacagttagttaaatctagcagaccgtcaattgaggtaggtggtgaataggaaagactagtatagatttagcagtcaggcagaaagtgtttgcatgctggcttctcatgctaactctgtgtgcttgcacaagtgacttcacctttctgagcatgttaaagtttgtaaaatgcaaattcttattttactatttggtatgaaaagtagagttaatgtaaaatattaggtgtctagtatgatacttaatatgatacttaatacgtagtatagtagactctttttttttttttttttttttgagatggagtctcgctctgtcatccaggctggagtgcagtggcgtgatctcagctcactacaacctctgcctcccaggttcaggtgattctcctgtctcagcctttcgagtagcttgggactacaggcgcccgccaccatgcctgactaatttatgaatttttagtagagatggggttttactatgttgggcaggctggtctcgaactcctgacctcaagtgatctgcctgtcttggccttccaaagtgctggaattacagacgtgagccaccatgcccagcctatacatagtagactctctgttgcgtctcttgtgcttctgaaatagaatatctattagactcattaaagaatctctgaattttttcatccaccaggccattaggaggtgataggactttcctcttgttctgtgatatatgaagctgtatttcttcccatatagaattttgactgttgcaaatggctgcctcttgtaaatttaaaatctggaaaacaaaaagctgtttatgggaaagccctctgattctagaactggttgcctttatgccctcagggtcaagtctcgtactcctcagttgggagatgttacacatagcatcacattgccttttagccaggtgtttttctaggttcttagtcatctcaagtgagtacttatttttagaactactctaaggacagggtattgggtgccttttgagaaaactagaaaaagaatttggcaaatatagcaaatttgggaggttgattaaatacagatctcagtagaggtcctgagacaggctctgggattaaactaaatttaaacatattacaattagagagacaaagaaagtgagaaaaacctggacttagttaaaatcgaagtttgtttgttttttttactttaagttctagggtacatgtgcacaacatgcaggtttgttatatatgtatacatgtgccatgttggtttgctgcacccattaactcatcatttaggtgttttttttttttttaatgttccaaagtaatgtgctttgttcagccattttcagtaatagaagttgcaactaagtggctacagtgcttattactaaattatgtagaaacaaccatttaaaaattagtttaagcagaaaagctttaaggcagcaaaatttgatctgtataacctgtaagtatatattttcagaaataaaatgtttccttcaaggactgaatataacttttagaaaagaaataatctgcttggggaagccactttggctacatagaactaaagcagagaggaggtggccagtaaaaggattctgagaagagggtagctcctcatatcctggctctcttgattcaaagtaaataatggcatttgagtaagaagtctttgccatgaactaagtgccaggcaggtctgagtttagccccagttgaggggttacttgctgttcatcagtcccctcaaagtgctctagcttcctttgcaaaaaccctgtaaacataacctcacccccattcctttcatctaacctcaagcgtaccaaaaaccattcctcacacccagatttagagacttacccaataggaaaatgattctgagctgtgaaaagtaaacaaaacaattgttttgtttatctgtccactggactgaatgttcacggatcttggtaggtcacttcataaagagaagtaagggaagaaaggcagggaagatgatcagagaagagctgaggacaagtgtcatccgaggaagtcaagaggattcatcccgggcatggtgtagtgataagaacatttcactgggagacaggaggccttggttccaatctggctcagccatttactgtcctttctcctgactgtgtctgtttcctcatccgtaaaggttttggacaagatggttttaggcatggggttagtgagatgaataagacaaggatgtttctgataaaggaaacaagcttgttgtaaacaaagaaaatgtagtattgtaaatgctttaagtaggagtctataaagaagagctgtggatatagttaactcagtggggctttgaagaatgcttgagatttcacaaagattaagatgggggaaagcagagagaacagcctgtaccaagagatggatggtgcatagctgacacccaaggtatgtataagagtagggagggtgatggagccagaagggtacctggggttagatgtggaggtccttactgcatgtcaggctaagaagtttttcccattggtaagagagagctctgaagctcttaagtagaaggaaaacctgattagttagcatttaaaaagtaggatagtgacagcatcatagagaatgttttttggtttttctccatggaggaagagacttgaggcagtcaagctcattttggaggttatttcaagagtaaggcagtgactttggaaataggaagggacaaatttatgagctgttctaggatataaaataaatatctgggatttagtgaccctcaaattgactcattgacttcccctaacctcagccatggctgggttaggtaggagtacataactgttaggtacaattcgtacaatgtcttctaaagtccactcgcctttgaaatcactgagccatttggttccttcccctggggatgggtactgaagttgtgtgagcaagcttgttcttagcctctttaattgaagagctccattcagaagcagtggggagtaattgatgttcatcctctagaggctgaaaaaatcaaggaccacaggaagctttttataaaggaggccaaacccagaaataaattttctccagaactccttcttaaaaggattcttaaatctcataaccagaacgctttctctctctggactagatctggcttcacttttaaaaagtgtttgtgtgtatgttgttaaagaaaaaattacttctgacacttcttaaaatggttcagtccttgaatccaggagcttgaggttacagtgagctatgattatgctactgcaccctaacgtgggtgacagtgagaccctgtctcttaaaacaaacaaaaaaggtaaggaagaggtttttcttttctctcttttttttttttttttttttttgggacggagtcttgctctgtcgcccaggctggagtacagtggcgcgatcttggcttactggaacctccgtctccctggttcaagtgattctcctgcctcagcctccctcaggtagctgggattacgggcacccgccaccacgcccagctaatttttgtatttttagtagagacggggtttcaccatgttggccgggctggtcttgaactcctgacctcaggtgatctgcccacctcagtctcccaaagtgttgggattacaggtgtgagccaccgcgcccggccaggaagacgtttttcaagactattacaataagagagagagagatccggcttaactccaaatatgacaagggcaagtggggattgatagccaaggagcaaggtgaaggggtcagtgggtagaaagcgacttaaaggaaacatcaaggctagggggattctggctaaactgacctgacaggattcttgctgaaggcaggccaaagacttagacatcaacagtggaggatgaggaacttgatcagatagcaaggatgggggtgggtggtgggtgaggctggttgtggggactcaaacttacttagcaggattcttgctaaaaccgggctgggcaggtgaaagatagaaggtgaggtggcatggaggcaaggtcaggccctagagggctttgaggagcctgactgaagtttggtcaagcagagtctttgccagtgtgtgttttattacaaaagtaatatatgcctcacctccagaactaatttgtcttcaaagcttggtatgtagccttccatatgtttgtataagcttagaaaaatactctgttcctacagaaatgagatcatactgtacttactgttatgcagctgcattttccacgtcgtagatcttcattgtgtttcatgtcagcacactagacactggtctcagtctttagaatgccttgcctcgttttatagattatttacgaaaattgtaaactggaagtaattcatattttatattttaaattatttatgttcattactttaaattatattataaattatatttatattttaaattccagtttataacttttttacatacattatcccatttgttgcataaaatgatcctctaggggtggggatagggcaggtaatatgtccattttacatagaggttacatgatttattagactttgcagctaatatgtgtcaagtccaggattcacacgtgtcagttgcatgtgtgaaaacaattttagatctttgacattcagcttacatataaaccacatgtggaatactgtttttgtctgtggtgctttgggacttttaggaaatatatgtggtgtatataggacctagactctgataataaatttcatttgagacatttatcccttttaagtgtattattaatttctgtattgaaaattcttgtcattttaatgtccccaaaatgacaaaataatcatcttaaataataagattaaatgaattcagtcagtttgtagcaatactttcaatacttaccttaagtaacagactttgtcagctaattggatttctggaaatgttaatggaagtctctcagttaactacctctactcatgtccctctgggactcatttcctccctagaacatcacgcctctctttctcagtattctttattggtttcctgggaccctggagggaaagaaaaggcaagacaggatgaatgaggagtggggaatgtgaggcggggcggaaatgaaagaatatgagctgtggagaattcaccttattcaggaatgagaaaaacagcaaggaaaaaagccatttctcaggaagctatatggcatggtggtgaagattttgagttaaacccaatgtcaccctttctagctctgcgaccctgggtaagttatttccgtccatgcttgtcaatttcctagggtttccttacagagttcttatgagaaggaaatagtgggttatctaatccacttaaagtatacttggcccatagtaaacatttaatcgatgttagctgttatttctaagctttttagatgcaaagttccaagaaaggagtctgaaagtctggatccagtaaaatgaccatataatgtattgttcaggccaggatgctgttaataattgtgggacaacaaatataagccagtatttgtgatttccctaatgggggaggcatctgtgcccccaaaactctgactgattaaggcaactttccttcctaccacagcctaattaagctaagcctctggactttgacaagccagggagcaaatcattcttaaaaactctttgacagatagacaaatacacactcactcactcactaaatcacaaaagaaactttgctttttctttctaggtaacatgtcttaaagtgatatgagtctgtacaaattttactaaatatttgtgcagtattgtttacccaataaataacttcgaagaatatatttaagttctttttttttttttttccaagacggaatctcactctgtcgcccaggctggagtgtagtggcaccatctcagcttattgtaacctccacctcccgggttcaagtgattctcctgcctcagcctcctgagtagctgggattacagactcgtaccaccacacccagctaacttttgtatttttagtagagatggggtttctccatgttggccaggctggtctcgaactcctgacctcaggtgatccacccatcccggcctcccaaagtgctgggattacaggcgtgagccaccatggcccagcctaagttcttataagtagtttctgccacttaaaaacaataattttgacacatcttaaatagttaggtctcctcatgcctttaggtgtagatttttcttacctgttgagttctcagtatgtgccatatgcagtgcttaattggtggtgaggatataatggcaaacaaaacatatttgaatctgcccctgagttgcttgtggtccagtgagaaaggcaatcaagtaatgaaaaatgcagagctctaaactgagattgttttaatgaaggcaaagtacaaggagttctacaggaagttcttgaagagcctgacccggcctgggaaggtgaggaagaagttccctgaggagagttttgctcaacactgaatatcaattaaaaaggcaagatgggatgggggtctgggaaagaggcagaaaggagcttggtcttctaggaaagaaggttctgtatgtggaatgcagaaaactgggaaatgtctgttttttaaaaaatcaaccaggctccactgtgatcccacactcttcccactgtttgcaatgcccttgcttccctttttcttgctaatggcattccattcatccatcatcactttacagtataattttttgttttcatgtctctgacatcctttaggacagggacttggtcttatttactcattgtaagatgtttagaatagcacagcaacctttcttcttctttttccctctccccatagtgccaggtacttactgtgtgcttgctacttgggaagggggcacaagacaggcacagtgcctgttgtcatggagcatgcactgtaatgattgttttgctcattgagtaaatacgctgaatgactcacccttagaatcagaattgtggactctggaggccattttcatagagtttcagcagttctgtgccttctttacagttgtgcaacagaaacaatcaatgctcaagggttaagaagccactaataaagtaagttgaattaaataagataaaggccccccaaataatagtgaaggcactggagatataaggcttgttaaaaatataatgtatatgttaatcctcatgaatacatcctaattacagcagagaactcttgtagtgttgtccactttgtggtggtgtgtttctcaggctgtcctgtccgtgttcatattggaatgacaatttcacactgtactcattcatgtgctgttcactatccacctttctgttatggggattgagagggagccggtgtctcacttgcccagtatagcaataacttaaaataataatccttagagcaaatgtacaaggaggtttcaaacaattcgtcattgctcttgggaaacctatggatttgtgcgtgcgtgtgtgtgtgtggtattgtgtgtgtgcattcacattgcggacaagaaacagaaggggttagaacagaatagcaagaagagcaacattggatataactgctatgtttatcctgaagataactgtccttggcaggatagaagaaggaactccttgctggctttgtggaacaaggaggccatccttccaagtttctcgtgtgacttgtgtcacgtgtgcaattaaaatggagtgtcacctttcttgcttgtgtctctcttaagagggagtaaatttttccaagtcactgctttgcagaacatgcttaaacacaaaaccacaaggttcccagaattatagatttcatagttgacaaggtcctgcccacctgtcacgtagcgtcagcatcctttgtgcatcagtcccactggaaggccgtttgtgcacacctgattcccttcctgggaaagcagccatttccagttcttagtgctttcttcttctggtgtttcctccatattactgattgttaggcttatgctgttgtttctttattttaaaattttaaacatcctctattagtcactgttagccttcttacactctctgtccactgcctcccccttcatccttcaagtatatcacagcttttagttacatcagtattaaatgcttatgtttatgttattatgactattagtattatttacctgctgaaccacttacactataattctatttttttcttgtacaattaattaattttcttcctgttgatttttctgagttttcttttttcttttcttttcttttttttttgagacagagtctggctctgtcacccaggctggagtgaggtggcgtgatcttggctcactgtgacctccacctcccaggttcaagtgattctcctgcctcagccccccaagtagctgggattataggtgcccaccaccacacccagctaatttttgtatttttagtagagatggggtttctccatgttggccaggctggtctcgaactcctgacctcaggtgatccgtccacctcagcctcccaaagtgctgggattacaggcgtgagccaccacgcctggccattttctgagttttctatgtccagcttattcttacttcccaaatcacaactataatttttaagtattctttttttacatcctaggcagatacatcagttgatcatgttggtttcgtttccttctgcagatgcccccctggattcccagcattctccagatatggtctctaggcctgctgtgtagctgattcccttcaccccgtttcctggatacccatcttcctctttctcggtttgctcatttgtttggtagagcacatcctccagtcatttcctgataaaagagtgtgtgggaggtaaagtttgagaccctgcatgtctaaaaatatccattctctttttatacttgactgattggaagtcatttcacctcagaattttgaaagcatttctcctttgtcttatggctttcagaggtgctattgaaaattctggtggcgcttaattctttgtatgcaagctgtttttttactctcaaactgtgttctctttatcccatttattataaaatttcacaatgtgacttttaaaaaattcttattcattatactgagcacaggatggactcataagcggaagttcaaggaaaatttcttaaattatttctttgatgatctttttttctctcttctctggaactcttggtcctcgaattttatctttcctatttccaacctctatctttggttccactttctgagaagtttattctactttatcttctggatcattatttatatttttatttatattattatttttaatttccaagaacttttcactgatcctggtttttgttttttgttgtttgctttttttgttttttaatcctgttcttctgtgataataggttttcatttttgaggttttatttggctccttgtctcatatctttgagtcatttttttctgtttttttgggttttttttgtgtgtgctctgtcttttcatgttaaagtcttttcctcaaatgtctggcaatccttggttgtcacttgtattaaagcgtgagacactaaaaagctgattggatgttctgtatagaggtgggaagagattgtcaaggataggctttatattaatattatatagggttatgggataggagcccctcctgttttattgggaaatccccgaaagccatcatctgttgaacttttctgtggtatcatttattttctccaagaaagaatccctcaacttttctgtgtagggatgggagtggagctcccattccagcattatggaagccaagtggattagggggtgctgggatctcatcattcaagatagagactttcattcagggcctctgatttcagtacagttccttcccctaccttctactgttcctaatattcctgcgtctagatccaagctggttcttacagaataaatcaaccctctcctgtgcaggtagaggagtaatagtccctggctgtcctggatgtgacagcagacctggtggtctaacacctctttatacagaatttgtattaagtcccagttttcagcccctccccgtccctggcctcctctgccacctggtgcccctaatccctgagccttcccaagggtgcctctgtgaattggcatcgccttcacaggctgcagagattcacttttttctcagctctactaacttacctactttttatctttcaaaaaggatcaacattttatgttcagttatcttctcctgttccttttgcctttttgtttgtttttactctgtttttaatggggttcaggagagagcagaaataaaagtacatgctcagtttgttaactgaactcttttggcactgttgtggggcttctgtgtctgactgtttcatgtctgtgttttgtcttcccttgaagattacaagcttctctgacagtggggatggtttcatagactccttgtatctctccttttaccctcaactgttaagtatgtagaaagcattttaggaaggatgtgtcaaattcatttgagtaagatgaaatcttttctaaattagactgatttgagagagtgtttccttgtgttggaaaactgccagcctttcctgaggttcagagataaatctcactttgcaacaataaccaaaagaagaaaacattgaaagcctttggcagaaaaaggctgatgagacaaaactcctgtttagacattatgatttaatgaagaattgttggagagctgcctaggacctctcttccccctcaagtttattgctccctctttacagggtctgtgatccagaaggcctttatctgacttgatgctttgagtcgttgacctcctgagaactaatgcaggaggagacccacagagatgcacgctgttttctctaaacattcagtgtcaagggactggagaaactggaaggaacatgcactagagtcagatgtggaattttgtttccgttctcatgtaatcaactatatgacaatcagcaagccatttgaacttcagttttcttacctgtaaaatggaaataccggtatctgttttccttcttgatagtatgcttgtaagagtcaagtatgggtaccatgcatgcaaatgcatgtaaacatttagacattgtcatttcaagttatttggtgtgtaaccatggtacaaacaaggatgggctttatataacataggattatgggttccagaccctcatatcgacctactgaccagacatctacatatgggagtcaaaattcatttcagcctcaacaaattcaaaataaaactccctcccgctcccttctcttctcccctacctcacgtcaccacagtcacaaaacaaagcaaccctggttttcccccagaattctcactactcactgagtagcctgattcaaacagccgccagtgcaccccaacctgcatttgacaaggtcctgtcttttctattgaatctatccttttttctctgtcctctttacactgcatgaaggtgtttacttcatgcctgaattactaacttcacctgggctccctggatctagtcacacacttctcttagtgtatcatttacacacctgctcagcataatgatgaaaaaaaattctgaaatatgtcaggccatcacaacagtatagtgaataacaaatggaccatctgagtacccgcctcccagctgtcaacagaaggatttttctaaaacacccatctgattattccccgcttgaatctcttcagcggcatacaggaccctttctgatttgactctgccggcctgttcaaccttgcattcaccatccttccacttgtatgctccagccactcgtagttacttgcaggtgtcccactttgctgagactactcaggggacagtgaatttggatgttgcctcttcgtttctgcctggctgcttccttctaaactttaaggctcaacttaagtatctcctcttctgtaaaacctctctgttcctatttcccttaagccagtttgtgtacttccttcccagaatgtcacacactgtacagtattgtcatttgtttactggtctgacttcctcactgaactcaagggtggggactgtccagcgctgtggcatcaacattgattggattcaactggattggacacttctggcccattgagatgccattacttgtctgtgtaaagtaagcaataaagtagctgggctaccacatgaatcatgtttactgccagctaaggccacttagggtatcattcagtccagaaatctgacctcacgcacatgaaagtggcctgagcactttggttctaacttatggttcttctgtcgctgtgttttatgtacagacatctcagatgcagtgttcttgtatgtcccatcaagagattgttgccattcttaatggatataaatgtagtaggtttgttatactgcatagagaccatgtcatactggggtaatgttggttcagggttggcaagaatctgatctggtaagagggaatgagcagattgctgaaaactgaatgttagaagttgcaccctggtggccctgggccaattccttacatagtgctctgttcttggaaacatgagggatttccctaaaggacttataatatatggtatgaataagcaggataaataattcactgtggctcaggatcagataggataaatattgtggtgaagatgcagtggatgatctggaatatctgagaagggtgaaattaatagcagccagtgcaatcaggaaagatgtggaggatcaggggacatttgagttgggccactttctgtgcttgacagaataaatatcccatttgtcttgcttttgcgattcttatttgatttcacagagactttaagcaattttacctcaagttttcgcttgagttttgctaggtctgaagagtggtaagtaaatttagctatgagtgttgatggatttttgaaatcagataggaggaaccctgattctctgttaagagacttagtttctgatcacctcagtttagcctttagagcctgtgcctccccttgttttgaaagtgctcccctttccttcaagtgtggactttatgtcctcctccgttttctacccctggcagtgaacactactaggtgttcagcggatgcctgtggaactgaactcacctcgatgtcctttgtgatgtcctctggcatctctgtgggcggagctccctgctactcccctctccagccacaggtcaggcacgctccttcccagggctcctgtgtttgatgctactctgcctgtctacctcagaccccctcacggctctttactttattcagatattctcaaagatcaccttcttagagaggtcttttctgatgaccttatctcaaatatcactcatttcctttttatccccttcctttgctgcctctgcttcctttgctcacttttggcccttatcaccacataggcatcataggatctatttgtttgcttattcgctcactctctccctcctcctagaaatcaagctccatgagggcagactttgtctttttccatctgcatctccagcccctagaaggcgcacttcacgtgtctgctgagtacatgcgtgagtagctccataaacaggacctcatttggctccttcaccaaatagagtgggctgtttctattcatcaaaacctccaaatccagcacagtgcccggcatgtctacacatgcaatcagtttttaaaggaatggagagaggcctttgaggggggattcaaaagccacagggcctcaccagtcatattcttccatgccctccacagtgctttagatgccatcccaaaacataggtgccgccgaggtgcatagggcaaggcttgctgcgcttcagcatcatgtgaaagcaggttagcttttttgacatgctaggcctctcaatactattatacttgctcaaacttctagaagtttccatgaatgatttaagtcctggggagcccatcatggtagactttacaaatgcagagacagtagtgtggaaaatcaagtgaattgtccaaggtcaaaaaatgacaagtggcggaggcgagttttgaagtcagtttggctaaccgcagagcccaagctcctaacttaggttccatagcttcatcacgcaggcttgctgtgactgctccaggacccattaagatcagtctgagcatttgtcttgcaagtcaagggcagctattgcatttctgcacaatctttacaggttaaactttgcttaggaatctcctaggctgtgtttaaggttgttttctctggttcttgatgcattatatgctgcttttgtttgtcggtgagcagccctttggtgcttacagttttagaaaacctaataggacagctgtgatagggaggaagacctagattgtaagtaactcttttcttgagctgccaaaaaggaagaaacttgggtggagggggatgttactaccatcctgtctgaagctgaaataccaaacaaggagattagagttctccagtttcgtttagattttgtttaatgtgttccccagtccccaaaacttctagatgggcttttggaggagaaggtagagaaaaagaaggaaaaaaggcctctggttggaaacgttgctgctttttgcagtgaagtcactatcttttttccttttcttttctaattgttttgagggagttttagtgctgacataggatgtccaaacttaatcacctttaaaccagtcatggaggcaaaagttagaaaacgatgaaaggcttgcttcatcctgcctttttgttaagatcaaaggcagtttaaatcttagtttcagggctccttggggacatgaactgagagggctgagatagttgagttctaatagaactaaattggtagctgataggcccgcactctcagccgctttaaccagccttggtgtttcctctttctcagttcttcttaattattctagtcatcgcgttgctgctgaattatgtccactacatattcacttcatgttgttgttccagttagatcagacagtccttgtttggccaaatgccatgagctccatcaaagagagtttttgatctgccgctgatttcgtgtgtgatttggggcaaataatttgtttttagattcttagtgtcacctgtgctataatgatgatattttctcttgtgtggcaatttgaaaataagtgtgacaatggtacctcacagattttccagatccatgtcacttgccatcaccctgatccattgtcaggcatagtcatatactttttggtttggaaaatgaggtcattgtacaaatgtgttaaagagatttaattgcatttagcttcttgtttagaaagtgctatagaagttcaggcttagtggaggatggggtatcacgatgtccctcaggctcctcaccttgtcttcaccatccttagttggcaatgaacaaatagcctagatatcgaaatacatgtatcttgctttttaaacatttatttttaattgacaaaaactttatatatttgttgtatacattatgatgttttaaaatagctatacattatagagtggctagattgagctaattaacatatatattacctcacatatcatttttatggtgagaacacttaaaaaccaactcttggccaggcgctgtggctcatgcctgtaatcccagcactttgggaggccaaggcaggcaaatcaccaggtcaggagatcaagaccatcctggctaacatggtgaaaccccatctctactaaaaatacaaaaaaaattagccaggcatggtggcatgcgcctgtagtcccagctactcaggaggctgaggcaggagaatcgcttgaacccgggaggcagaggttgcagtgagccgagatcccaccattgcactccagcctgggtgacagagcgagactctgtctcaaaaacaaaacaaaacaaaacaaacaaacaaaaacaccagcgcacttagtgcttttttctttctttccttctttctttttttttttcttttgagatgggatcttgctctgtcgcccaggctggagcacaatggcacgatctcggctcactgcaacctctgcctcccaggttcaagcagttctcctgcctcagcctcccgagtagctgggattacaggcatgtgctaccacacccagctaatttttgtatttttagtagaggcggggtttcgccttgttggccaggctggtctcgaactcctgaccacaggtgatccgcctgcctcagcctcccaaggtactgagattacaggcatgagccaccacacccggctgcgatttttaagattataatacgttgttattaagtataattgccttattgtacagtaaatctcttgaatttatccctcctgactgaaattttgttcctttgaccaacatctccccaacatcaccccctccagctcctggtaaccaccattctatgctctgcttctgtgagttcagcatttttagattccatatgtaagtgaaatcatacagtatttgtctttttgttcctggcttattttattaccataatgtcctctaggttgataaatgttattacaaatgacaggattttccttcctttcctaaggaaagtatgtcattgtttatatataccacatcttctttattcatttgtccattgatggacaggtaggttgattccatatctcagctactgtgagtaatgctgcaatgagcatggaagtgcagatatttcttccatatactgattttattccgtttggatatacccagtagtacaattgctggttcatatggtagttatatttttaattttctgaggaacttcatactgttttctgtaaatggctgtactaatttttgtttttaccaacagtgtgcaaggtgctcttttctctacatccttgctaacacttaccttttgtcttttcggtaatagccattctaataggtgtgaggtgatatatcattttggttttaatttgcatttctctaatgactagtgatgttgagcattttttcatatacctattggccatttgtatgtcttcttttgagaaatgtcttttcagatcttttgcccaatgtttccaatcaggttatttgctttcttgctattgagttgttttgagttctttatatattttggatattaacctcttagcagatgtatggtttgcaaatatttcctcctattccataagtggtctttttactgtgctggcggtttcctttgctgtacagaatcccactttttctacttaaaatttatcttacgattctaaacctaatatctacatgctcattaaagtggcttgtcacccatatacagctgtgttttattaacattttgacttttttgtcttcttttccttgcgcatagatgattccccctttcttttacaatattattattataaaagcactatgtgaatagattctcactgttaagtgttttaaactgtggtagaatacagaacgcaataggaaagtctctcttcatcatctgcagtgctccctaacacagagattttcttccccagaggtgagcacaatcagcatttggtgagtgctcttccagtcaccatccatttgcagcggtgtgtattatacaatgccttctttcgtcgctttcttataacatggtatgtcttgggaaatctttccatgtcaggacttaaaggtccaatttgttttctttcctttgttattactgttgtcgttgatggttacgtagtattgtattttaggagtatacctaatattttactgcttgcctatggatagacattaagtttttagtttttaactcttacaatgaagcagtcctgtaccagcatgtgtctttgtgcacatgtgcaagtatttctgttgggtaattgcctggaagtggaattgctggctcaaagtgaatcctatttttggttttggtcgatggtgccaaattgtcttcccaaaggaatttaccagtttaaactcataccagtggtgtttaagagtgcttgttttcctaatatttagaaacacttgataatatcattatgttcatttttgtcaatgaatgttttaatttgcattcttctagattgtgtctctgtagatctgaccttgtctactttctgccttttagtaattcctcagcattgctgcttacttgatggtgtcttttaaaattttcttggtgtgaatctgtttatctgtctatagctctctatctgtgtagggtgggatatcttttctgtcacttcagggaactttagacaggaggtagagtaaacttgtgcacttaatctactctcctgataaatttcatcctttctgagctatgactttatagtatttacaattttgtttcttttttctccttaacattataatctttttttgtcttattacatagcaatgtaactggtatatgatattctactctgtgtctgtactgtagttataataatttgtctgttgatgcctattgctaaaattttattttattatttatttattttgagatcgagtctcactctgtcacctaggctggagtgtagtggcacgatcttggctcactgcagccttcgcattccaggttcaagcaattctcctgtctcagcctcctgagtagctaggactacaggtgcccgccaccatgcctggctaatttttgtatttttagtagagacgagtttccctatgttggtcaggctggtctcaaacttctgacttcaggtgatccactcgccttggcctcccaaaatgctgggattacaggtgtgagccaccgtacccggccaaaattttataaataatattgtttccaacactaagcataaaggctctgggctcagatggctttactggtgattctttataattttagtgctctgtcattgtcttttttttttttgaaatggagtttctctctgtctctcaggctggagtgcagtggtgtgatcttggctccctgcaatctctgactcctggattcaagcaattcttctgcctcatcctcccgagtagctgggattataggtgcacactaccacacctagctaatttttgtatttttagtagagggtttcaccatgttgagcaggctggtgtcaaacttctggcctcaactgattggcccgcctcagcttcccaaagtgctgggattataagcatgagccatcgcacctggcctgtgtcattgattcttcaatatggaaatgagtagacagctgcccagctgacctgtgactttaacctaacactgataccatccagtaacagtagcacaaaaagcaagaactttaaatcagtctcaattatgaatatagatcctaaataatctactctcaagtagatgctctcaagtagaatttaccaataaggtcataatggaaatggccaattaagtttactccaagaatggcttaatattaagaaacctattgataacatattaggttgtaaaatgtgaaaaactattatctccatagatgcagaaaatatatttaaccaactatttctaataacactttttgggggaaaaaaaataggatacttcctttacaagttacagagtatctacctcaaaccattagaggcattctcattagaagcaggaacaaaacaagtttgccctctgctacttgatattattttagaagctctagccaatgcagtaaagtttgcagaaacagaaataagaactaaggcttttaggattatttgatattattttagaagctctggtcaatgcagtaaggccaatgcagaaacagaaataagaacaaaggctttgaggattaagtaaggtaacatttcagcttccctcctatggtatttttaagtcagataagacactccaattatagattgttatttttttaattaataagacatctttacaaaggaaaggcaaaatcgtctcttgcatcttaagacacgtctcctggtgcttttttgtccttgatccttgctcgttggctcgtcttgattatctgatctgtgttgaggtctctctcaaaccttcagtcaccagtacaggagtgagaggtcaatacctgtgactggcggagaggtttggttctgtctttgatgacctttcaatgagctgtttttgcaatcctgggagtactagaagaacagactcttaagcgatgacactgttgtcttgaaacttgactctgttcagcaaaccattgcagtgtaccctcagtgctatgcatctctgcagtgtatagctgctgtgtgttatcaggagtcatttggaagtaactggtctggttgaacaccacacagaaatctttactaattagctagctatctctaactttggtttgtgacttcggtctgtgaaatctatgtctctctcttttttttttccctgatagcatgtggagagggccaaatgtgaactgtgttgacagcactggctacacacccctgcaccatgctgctttgaatggccataagtaagtatcaatgtactacattcctgccttcacccttcagaacccaggccttcacgttgccttttcatttcctagaaaagtttgctggctgagcttagtggctcatgcctgtaatcccagcactttgggaggccgaggtgggaggatcacatgaagctgagtttgagagcagcctgggcaacaaagcaagcctccatctccacaaaaaaaaaaaaaaaaaaatttttttaattaatcaggcgtggtagcatgcctgaagtcctagctactcaggaggctaaggcaggaggattgcttaagcccaggagtttgaggctgcagagagctatgattgtgccattgcattccagcctggttgacagagtgaccctatctctaaaaaacaaaaacaaaacaaaggtttgctaagcggtggcactgagaaacagagaaaaacaaacgtaagttcagttcattcagcatttctgtgtctttctttcatgtataatttaaacatccttccccaccctacccaccaaaaaatcttcagccaagagttaagttttaccttttcttctgcttgttctttttccctctggaatgttccagtgctacataatgttctaggtatgatgatcaaatttggggcagccagaacataaaggggctggaatctattaggtaactaactgctcaataaactgaaaatagattaagtggtcatgagaaagctgtcttctgtttcaatagttatttatttactctctcttcttgcctgccattctttcctcataaaattagccctgtacacaagaaccctttttaaggggaaaaaaatacattaaatggcctatgtaattctcctgagtatagagaagttattaggaactgggtgggatttgtgtggaacgttctctggaggaggcatgctttggggagaatttgagagagaaggcataggcttaagtgattgggcactgcctttcaggttgcccagcaaaggggcaggcattgtcggggagcacagtgagtgggtttgccaggatgttgaagaatgtaaaccagagtgtaacagaatagaaggtgttaaaggaaaacaagtactataggcaataagtagcagcagtgtcgtttttttgtttttgtttttgtttttgagatggagtttcattcttgttgcccaggctggagtgcagtggcatgatcttggctcactgcaacctccacctcccgggttcaagcaattctcctgcctcagcctcctgagtagctgggattacaggcgcccgccaccacacccagctaatttttgtatttttagtagagacggggtttcaccatgttggtcagactggtctcaaactcctgacctcaggtgatccacctgcctcagcctcccaaagagctgggattacaggcatgagccactgcgcccggccagcagtgtagtttttatgaggagggattattggaatcattttagattttgctgagcaaggagctccagagccctctaccttagagtattttgtgtcacttgtccgatatttgacccaccctaattgactccaacataccaaaaagaggcagtggttgtttccttcaacattaaacatttctaaaatatactgaatatgatcattaagtcttttctgtagccatcttagatatagctaaaaagaaatctatagagaacactgttcccatatatagtggggtaatctgaattaaagtgaatcttgaacttaaatgactatagtttgttagccaagttcatttccagatgctgttttgatttacagtggggattttctttgacctcacattcatagggataattatatactggtatgtgtttaattagtgctgtcaccaggaaaaaagcaagttcctctttctggggatatcaaatgataacatatgtgtctggcttacttttgcaataactatttatttatttatttatttattttgagagagagtctcgctctgtcacccaggctggagtgcgatggcgtaatctcagctcactacaacctctgcctcctgggttcaagcaattctccctgcttcaccctcccaagtagctggaattataggtgcccaccaccacacccagctaatttttgtatttttagcagagacgggctttcgccatgttggccaggctggtcttgaactcctgacctcaggtgatccacccgcctcagccttccaaagtgctgggattacaggcgtgagccactctgcccagcctgcagtaacttttgttctgcttggcctctctgctttcagctcctacatcactaaatgctctgaataatgtggtgaataataatatttgtcttgtatgattacttttatgtaaattcaacacttgaatgctgtttaaacatgataaacaaggaaacaggtttggacaaagagtccagacattttcaaagtagtagaaaacagacggattaccaagaaagcctaaacagagaggtgatgagtcagcatagcatggctcaaggtggttctgctgcatatcagcagctgtacaagtagctcatggaataaaaggaaaagctggggtggtgagctcaggtagagacacaggagccaaatgagatatctgtgaaagggctttgtgccatataggtgtaaagagctgttagctggaaagacttctgagttctaccaactcatgattgatttttgccttctagggatgtggtcgaggttcttctgaggaacgatgcgctgaccaacgtggctgactcaaaaggctgctaccctctgcatttggcagcctggaaaggagatgcccagatagtgcggttgctcatccatcaagggccttcacacaccagagtcaatgaacaggtcggaaggaagggaggctttccttcctccattcagctatagccagatgtggcaaccccatcaccatcttagccccatagttcaaatctcagagaaccagctcttccttttctttctttttgataatcagttccttagcatggaaccacctcttccataccctaattgtgattcccctcttcccagttctactcttcttagtagatcttatactatgaggatgtattttatatgcatttgactcatgcatatttggaatagtactagaataaaaatgtatacacagtcagcccttcgtttccaggacctccccatagataccaaaatccaaggatgctcaagtcccttatgtaaaacggcaaagtaacattagctgtctctgtctgtgggttccgcatgtgcagacttaactaaccatggatggaaacctgtggatatgaagggccaactgtattcactttatgtgcaaaatttgaaataatgcaaaccctgcaaaattgcatggagtcagtttcaagctagtgagcttaattaactgtgggctgggtgtggtgactcatgcttgcaatcccagcactttggaaggctgaggcaggagaattgcttgaggccaggagtttgagaccagcctgagcaacacagtgaggagccccaaccccccaggccccatctctataaaaaattaaaaaaaaaaaggccggatgtggtggcacacacctgtagtcccagctactcaggaggctgagacgggggatcacttaagcccaggagtttgagggtgcagtgagccatgatcatgccactgcactgcagcctgggtgacagagtgagaccctgtctcaaaagtaaaagtaaattctgtttatgccattgacatggcaatgtaactttcccagtgtttgtcagtactgtgtaaaccatgctcttgttttacatacatcagaacttgcagcagtataagtactcatgctagtgccaaaaaatgaactcacaaatcaggaacatgtgaggggaggtcagaggtgattcagtggaatgaagatcatttccatgatgtcctccgagtaagcatgctttgaaaaagcagagatgattcttagaaaatgaaaaaggcaggatttgagcaaaaataaccgtataatggccatggatttagttactctgagaatatacctgttctttacatttatatctttggaaaaaattgtacttggattatgcaagttttaaacaagcctcttacaaatacaactccctgtcatttgggttggaagttgtgtgcaagtttgagaggagacgggcattccttatatgataagccattctcccctttcctctctctgctctgaactgaagcagatacttttctcagttcctagaaggagggagatattgatgtttctcagtaagcttaggactatttttctaatgactttgccgagaggggattgttaaattacctgtaggattagatcaaagttttccctcaaaaaataggaaattatcctggcaagtccatctgtcaggagactcatgcagctctcagttagctgttaaaagcatgactttgattctgaggggggcagcttcattctgagacatgagaaaattaaaatagtgctcccaaatctcttgatttggagattgtgtgtatatagctgttaatcagccttcctttccccttttgggctgtattttctgggtaggtgagcaacagacatttaaaatcatcagtgaggatgtttgtttataacatttgggaatgaaaagtatctgtttagaattacttctttagaatctaagtgcaattttactccttctagctaaagtggtcatttctcttctctggaggaaatgcataatgaagtttgcttgtaactaatattcttcaatgttggaaagactggtcatccattaaagtccttctcatttaagaaattttcagcaaccatttctaatcctctttgctcacgtttgccttgaaacacagctgcttggatttttgagctacttgagtgtgctagcttaacctgctcacagctgcctcctgcttggagtatcagttgataagtgggaccccagcccagtgctttgagtatctggtaggcaggtggtgggcagaagctgggcaagatgtctgcagtagcttgaagactttaatggatctagctagtggttacaagtactatattgattcattttaaaaccattaatatggttccagtaggatgcttagattaaaggggggtaagagtaaggtgctctggaggttgtctttcttattaacttccctttgaggcatccagagggcagattcaagttgttctagggttgggttccctcagggctgtgtattgctttgatatatttcatccattttgtcatcactttttcttttcctctcctttttgtagaatgctcttgagatcaaagaactcaaaaagtacggcccctttgacccttatatcaatgccaaggtgtgtactttgctgccaggaattctctgcatcatttctccaagctgtacctcctctttggtcctctccgcttctactcttgtccactcagggtcctcctcatcatgctgactgttgtctgcttcagtccatctgcttttggcttgtctgggaatgggaaaatgcagctgcagtgggttttggctttatttttaaaacccatactaatttgggaaatggtgggtggttttttctggaatatttgaaatggcaggaatggggaaatagaaaggaccatattacatgcttaatttacaattttgattcttaaaattttttaaatgtagttaagagatgtcaaattatcttactttttaaataagcatagaaaaaatgattaagttgtacctcctggaattaaaaaatatttttaacctactttctatctgtcttttgaaatggaatctgattttcaggtttcaatagctaatggtggagatgtggaggaaaggacatggttgatccgttttattcctttaaaagctgttgcatgactcttctctcatctcctggagtttgtgcatctctgcctgatgctttaaaaccacgacccaatatctccagccattagcttctctctgcttgatcactcttgacccaggaagcgttctgaaataggaaactatgttgcaggaccaagggagccttagtctccctccctgtgaggctgggacaaagagtagtctgatgggcctggtgatgaacaggccagccctgtctgcccctcagcctttaccacatctgagcagcagagcttgttcattgggtgatggtgttagcctctttccttggtgctctcacccgctggttttggtcaaagattttattcagatgaagtttgctttttggcaacagtctggagtgtgctcaagacactacattatccacattagctaccttttacttgttctgaaaacagctgccttggggaagagaaacataaggtacttctgtatgtttccaaacacaaggcagatatttcatgcttttgagaaatagtgatttagcaaaggaagccccctatgggctggacctaggaaggccctgtgggagattttgttcagctgttgggtcttaatggtagagaagcaatttgaccttaggtagtggagcacatcagctttgttttggcttactctttcttacctccttccccttcccttccccttccccttgccctccccttcccttccccttccccttcacttccccttcccttccccttccccttcccttccccttccccttcccttccccttccccttcccttccccttccccttgccttccccttccccttccccttcccttgtgcttccccttccccttcctcttccctttcccttcccttccccttccccttctcttccccttcccttccccttccattccccttccattccccttcccttccccttccccttccccttcccttccccttccccttcctcttcccttccccttccccttccccttccccttcccttcctcttccccttcccccttccccttcccttccccttccccttcccttccccttccccttctccttcccgttcccgttccccttccccttccccttcgcttccccttcccttccccttccccttcccttccccttccctttcccttccccttcccctttctcttcccttccccttcctcttcccttccccttccatttcccttccccttccatttcccttccccttccccttccattccccttccccttcccttcccctttcctttctttctttcattttaaaaagggtctccctctgttgcccaggctgaaatgcagtgattggcctgctctttaaattctgttttctagtcttcagaataggaagatactcttatcttagtttttttgttttttgttttggaagtagagtgatagagtgaaaaactcataagtcataggctttcatgtcagaccagagtttaagttctggggtgcgacttattagttttgttgacttaagcaagttacttaatttctctgagcctcagtttcctcttctgtaaaatacggcactataatctaccttgctggattgttttggagtttaaataagataatatatataaagtaaaaatatctggtaactagtaatatttgagatactaattttttaaagtgtatgtaatgtatttctgcaaaggcatttttggaatctgtttttgttactagtagatgacgcttaatgaaacattattcagttagtctattcagagttttcttttatggggaggaaacttgaagtgattgttttcccaacagtggttaatttagtgagcttataaagctttgataaagggtaagactttggttcttgaaagtacattttcctatcctttaattttgcacatataaaataaaattagtttaaatgtagtaagaacatacttctttctttggaaataattccctttgcctcttccctgaaaggccaattgatgcaaactacattaagagtaaagctgaggccaggtgctggaattacaggcataatcccagcactttgggaggctgaggctggtggattacctgaggtcagggattcgagaccagcctggccaacatggcaaaaccccatctccactaaaaatacaaaaattagctggatgtggtggcatgtgcctataatcccagctactcgggaggctgaggcaggagaatcgcttgaacccaggaggcagaggttgcagtgagctgagattgtgccactgcactccagcctgggcaacagagtgagactcaaaaaaaaaaaacaacaaaaaaaaggaaagctagccagtgtagtggctcacatttgtaatcccagaatttgggaggctggggctgaagattgcttgagcccaggaatttgggaccagcctgggcaatataatgcgatcccatctctagaaaaaataaaaaattagccaggcatagtggatagtggtacatgcctgtatcccaaattctcaggaggctgaggtgggaggatagtttgagcccaggaggttgaggctgcagtgagcagtgatcactgtcacctgggcaacagagtgagaccctgtctcaaaaaaaaaataataataataatagaaacagagaggtaaagctgtttgggttgtgctgagaatgcaaacccttcttgagctgattcaaatctaacctcctttgaccaggcatggtgactcacacctgtaatcccagcactttgggaggctgaggctggcggattacttgaggtcaggagttcgagaccagcctagccaacatggtgaaaccccgtgactactaaaaatacaaaaattagctaggcgtgctggtgcatgcctgtaatcccaggtactcgggaggctgaggcaggagaatcacttgaacccgagaggcagaagttgcagtgagccaaggttacgccactgcactccaacctggatgacagaggagactccatctcaaaaaaaaaaaaaaagaaaagaaaaactgatctgatccccctaggttttgtcctgattcagtggatttttatagatctggcttatgtctaggaattgttttgttaaagtacttttgagtgctaagttctatcaggcacctgtacaaattaagaagtctcagatggcttattttgggagcagaagtagtttttaggagctttcatgttcttttttgacatttggggcctttttcaacaagtcggtgtaaaccagccaaatgtaaattatccttagctaaggcagaaccatgaaaattgcgcattttccccctcttaacaattcttccttagtctgagtcataaaatgagtaacaatcaaattaatattagggcagatctatttttttggtacatttaaaatgatttcacagtcttagaactgaaagggacttggaattttatctagaccagttgcctccaaatataatcaacctttctggttgcattagtatcacctgcaagcttctaaaaaactttttattaaaaaaaaaaacttgtaacttaaagttttaagaataatgccatgaactatggtacactcttcttgatactacagtgttaacattttgctacctttgctttttctctttctgtgtgtgtgcgtgtgtgtgtgtgtgtgtgtgtatgcaataattgttgtcactgatgaaatatttgatattaagtcatggacattatgaccctttaatcctaaacacttccattttggtattagttagttctttgacctaaatctcctaagaacaaggacattcgcttataaagccacaatacatttattacatttggaaaattcaatattgatacaataccattatctaatatagaatccatgttcaagttttaccagttgtctcaaaaatgccctttagagcaatttttttatgatcgagaatccagtccaggatcatacatattaataatatggaacagttcctcagcctttcttagcctttcatgacatggatggtttttaagagcacagggcagttgttttgtatactgtctttcaatttagctttgtttgatatttccttatgattagattctgggtatacatttttggcaggagcgccatggaagtggtattatgtatgtcctttttagtgctttgcatcaacaaggcacatgacgttggtttgtctcattcttgatgattatgattgattgcttaagttggtgcctacaaatctggggtaaacctactactagcattttagcattttttttttttttttagttcccatgtaattctaaaagctggtttgagaaccaccaatttaggccaaccttccacatagagcaggaatctttctgtcatttgaaaggtgaccctctaccctgtattttaattatttgcttgttttccctaataacaaacagaactcattactacttggcagcctgtttttggattccattgagttttggtttgttgagtttgattggcatctatcttcctaaaccttccatttttttttggatcagagttctgctttccagaacaatacagagtaagtctaactcttcttccacatgatggacttgctttcatgcttctcctgtgtcctttcaatctcagacctagtttttcctttctttccattatggtatgtttttctagggcctgtactttcattgctgcagatagctataggccaggtgtccctaacttcagtatctgccaacaaggggtaagtgtgcagttgggctgtaatctgagcactaggaggtgatagtcctgaaatagttccaagaggagaaaggtcgggaaaaagtttctttcttcctttttttttttgagatggagtctcactctgtcacccaggctggagtgcagtggtgcaatcttggctcactacaacctctgcctcccaggtttaagcgattctcctgcctcagcatcctgagtaggtgggattacaggcaagcaccaccacacccagctaatttttgtatttttggtggagacagggtttcactgtgttgtccagggggtctctatctcctgacctcatgatctgcccacttcggcttcccacactgctggaattacaggcataagccaccgcacccagccagaagtgggtcttaagatgagtaggaatggagaatttgtgcaaaagcattgggggaaatttgggctatttcctctcactccattttctcagtccagattagtagtaataggattttggaaactctggaggtattgtgaacacctgtagtgagatttggaaggtgtgacagggaaacattccagatgatcaggagtctgtgctgctccttagaatcctttcttttcttgtgagtgtattaaccagcacttaataatagtttcctaggcctgcgaggcgcggtagctcacgcctgtaatcccggcactttgggaggccgaggcgggcagatcacctgaggtcgggaattcaagaacagcctgaccaacatagagaaaccccgtctctactaaaaatacaaaattagctaggcgtggtggcacatatctgtaatcccagctactagggaggctgaggcaggagaatcgcttgaacctgggaggcggaggttgcggtgagccgagatcatgccattgcaccccagcctgggcaacaagagcgaaactccgtctcaaaaaaaaaaaaaaaaaaaagagtttcctagaccttaccctctgaggtgctactttggcaagtctgagattggacctcctactagtttttttgtttgtttgtttttttgagatggagtcttgttctgtcgcccaggctggagtgcagtggcgcaatctcggctcactgcaacctccgcctcctgggttcacgccattctcttgcctcagcctcccgagtagctggtactacaggtgcccgccaccacgcccgggtaattttttgtatttttagtggagacggggtttcactgtgttagccaggatggtctcgatctcatgacctcgtgatccgcctgcctcagccttccaaagtgctaggattacaggcatgagccaccgtgcccggcccctactagttatttttaagctcccatgtaattccaaaatgaagccagtttgagaatcactgatagttcttgccctgatagttgtcaggctcaaaaagcctacagtaataagagcttatcgtgatggcttgtgtcagtgatggatgtggtcaccacagatataataaacttgggtattacagttaccagaccatgtctggcatgactgaaacctaagtaagatgctccctatactgtgtctatgagtgtaactttctgcagagatgtggttagaccatttttaacatgaggcaggaaatttgccagtagtgattatgaccttgcctttagcagggcagctttgtgagagctgctttcattctggcgaagaagaaatagagaaaagtttttttgtttttttggtttttttttttctttgctggatggtttagacttttacagttctttagccctaatggcatactttttataaaatcaaggacaatttattctggttgttgggagacaacttggatataaaagagacagtagtatttgcttcagagtaaatagtttttctggattggaattttaataagaataagctgactttcttggctctttctatcacactcatcttgagatgtacaacctggagaatccttttaaacttctttgggttactactctgccccagaattactccacagaaagatcctgtgagtttttgttaatgtaggtgttggttcatcaggagaaagtgataatcaaccagagaaatgttgggttaaaaaagagagaaattgaagggacagctctaagtttgcttaggaaactcatggcatagcttaatagggccttccaaatgggtatcctaaaaggtttgtttggcacagggaggacctcaaagacttgctttctgcccagcatttccccttcctccagactttcaggttacatggaatttgcccctcagggcccagtcatatcataggaggccatggctggcaggccggctgtatcctctggccagcgaaggctgttggcactttcctgacagctgctctccttgagttgtgtttgagctcagtgcagcttcctctgcatcctctgtttatttgtgtgcatttatctttgcatgtgtcctgctactactttttctgtccttatttcatttaaaaatttttctttgccatcgttctcaccttttggggagttgttcccagcagctgtggatctttctggtatacttggtatagttggaaaaaatgatgcagtcaaatgccagatcaaaagcagatggaattgcatatgcatgtttgggtaattcctaatccattacttttagtgttattaatagaattaaagcaattgcagaaacatttaattttgaccttttgaccactgaaaggtgcacaatattgacttaactgacaaaccccctcttaagctttctttcccaaaagtagcagaagcctcctggataaatttaggaatctcaaaatcttgtgggagaattattttcatcagtgcttctcaaaaaggagaggtcatgggacttactttatttctgctctaattagacattgtcagtagtaaaagagcataattggaatgactaacattttgcctctggtggttgataaagcacacaattctcccattttatcccaaattctgtctttagtttgaaacaaaattggcattagaggactgtgggttgtgagcttgaattgatagcaatattacatttgaatattttgcacctctcacacaaaacatgccagcgtttgcctctttcttacataagaaacatcttcccgtgctggctgccattttaatgaagtagatactgcatgcgttgcttggtgcaggctcctggggtaggcacagtgcagtgtcagggtcccttatttctctgtgactgagcccgagtgccccctttacctggaaatggcttttggctgataccttgagcgatttttagtctgctctgttacttttcactgttggctgattgatttgcatgcaagaagctgtgcagatgaaaaacttttattaaaaagcttatgtgtaaggcaatggatggttgacaaatccagaatcagaaccatagggttgaatgcctacaaattgtaaaaccatttgaagtttaaactgaaataatagcagtgatattattggtattcatcttgccagggcttccaccaaatgcctgccacattttcttgttcactctccttacaacctggagacccttccttcatggcacacagggcattgccagtgtttaagagatgacttctcccctctcacagtcactgggggaaggtgtcgctgattagaccagtcaggcttgtttgtgggggagtatgtctggattccgacttttattagcccccaagtgttgctgctatttttctcatttaaacttcagtggttttacgagtggttgtcccagtcaggtgcctgtctgccagtgacctttctgatgtgatctgcttgttaaccctttagaacaatgacaacgagacagccctgcattgtgcagcgcagtatggccacacagaggtggtgaaggtgctcttagaggagctgacggaccccaccatgcgcaacaacaaattcgagacccctttggacctggcagcactgtacgggcgactggaggtggtgaaaatgctccttaatgcacaccccaacctcctgagctgcaacactaagaagcacacccctctgcacttggcagcaaggaatggccacaaagccgtggtccaggtcctcctcgatgctggcatggacagcaactaccaggtagcagggcgggtgggggctcctccaatctcaagagactcagtcattttgcagaaggcacaaggaccatgctgctgggctgtgctctttatttagcacgtttcacatcatgtttcaaatgcttatttgccgactcattctaatgtgacactaagaaacaaatgaactcctcaagcaagtctattatttttttgtttcttttcagggggtaatccgtagtcattaaaccctgaaaagatgtgcttatggactggctctcaaaaccagaaaagtttcattatcttcctatccatgtgttcccactgccaccatttagcgcctccacagtctcatcagcttgacgttgccagcaagaaatgtcacatttcctttctttgttagcctttcccattcagatgaataattccttaggtgttgtgttgaccaaaccacatttgaagtgagggtgtttctgttgtacttttcttcttattactccttccacccaggaaggtggagttctgaggcatttcaccagtagatggctctaagagtaactgttcagttattcacacgtggcctgctggtggcacagaatggccttggtgtatgggccatgatcgtggttttggaatccacacaagaaaagctggaaagataatgacagagggctttgtgtagtttgttttattttgtgtcccttcttgtctgtgtcccctttgtcacgtgaagccgcaccaaactgttctgatgacatcccgctctgcgctctcgtttgctttccagacggagatgggcagtgctttgcatgaggctgctttgtttggcaagaccgatgtggtgcaaatcctgctggctgcaggtgagaggtcggcagcgctcttgtctacacagcgtgccagggttgggattgtttctccctagtcccctagggggatttttgctggctgtgtttgaactcaatgtatgtgtatctccactggttgattacaagtgtgtaaactgttcttgaatagctggattaaatggctctggatgaaaaatgttggccatgctgctgacagccttaaatgtcctaaaatttgacccttttggaggctggcttgaaaatgctcactcccctggtccacctggtgtgcctttctaggaactgacgtcaacataaaagataaccatggactgactgccctagacactgttcgggaactgccttctcaaaagagccagcaaatagcagcattaattgaaggtatcatcctttctccctgtctgggtgaccaggggacacacgaattgaaccaaggcatttgtatttggtgcagcactttttatttttattttttgatctttccatgtagatcacatgactggaaaaagaagtacaaaagaagtagataaaacccccccaccccagccacctctcatctccagtatggactccatatcacagaagtctcagggtaaggtaactctcccctatgagtaaaggggtgctcagcttgaaaagagttgaaaattcgtgggcagaatggaaaaatcttaatttaaataataattttgggggattgtgagtacttagtttatattcagttcattttttgccaactactatgtgaagttttattggacatagtttatgcttttgactgtgggcctctttcctactttattttagcctccacttttccagttggctctgtgagatctattctgagatgtgtagtagagaggatcatctcaagatgaattcaaatctcagtgaaaccttctttttctaacacataatcacaatctagtgccttgtacacagttgacgagtaataaatttttttttttttttttttgagatggagtctcactctgttgcccaggctggagtgcagtggtgtgatctcggctcactgcaacctctgcctcccgggttcaaatgattctcctgcctcagcctcccaagtacgtgggattacaggcacctcccactatgcccagctaatttgtttttgtatttttagtagagacagggtttcaccatgttggccaggctggcctcgaactcctgaccttgagatttgcctgcctcagcttcccaaagttctgggattacaggcgtgagccaccgttcccagccaatatttaatgagtatcatctgattggtaggggggtacatggcaaattttgataatatatcatatgagcaacaaatgtggtctggatgggagcttagggagtctagcctaacagtagtcaggatccaccttttcagatgcatttagcagccttttgggtccttgatatgatgaatacaaagatagaataaagattgacacctttccccaaatatagattacaataaagaaggctagaaaaacagaacaaagctaaaaatgaaaaagggaaagggatttcccagaggagtgcagggagatacgggctgaagggtgcccagctctctgaactgtggagtccttgtcttcctcccacatgcactttttttcttgaccacataatctgctagtaatgggattagtagttcactaacctcttcaaggattttacatttatggttttgattatttacaggtgacccagagttgcctgggctctaatagttggtaactttgcagagtcacacatttggattgcaggtgctccgaggctgatagttatctaacaggccaagctaacagctgcatgggcctccagctcagaaagcctttgccgtcctctattttgcttgagcacatggagactcttattaaagaatgtaaagggtaacttaagtttttcagttacaccttgctatatcttatgggttaagtttatgtcattatggtattgaggtattttgggactttataaaggccttgggaggtatctcttatagatgtcaatggtttttcatattgaattaaagaaaaatctgtttagatctcagggtataaagaacagctgaaactatacgtattcttgtccatggaacaaagtaatcattttcttgctctgggttagtgtttgtgagcgcgggtgactaaagaggctttgggttgctgcagtggttggaacctgagattctgctccccttcagtgactctcttgccctccatcctcctctcaggtgacgtggagaaagcagtgactgaactgattatagattttgatgcaaatgctgaagaagagggtccctacgaagctctgtataatgccatctcctgccattcgttggacagcatggccagcgggcgatcatctgaccaagactccacgaacaaggaggctgaggcagcaggagtgaaacctgctggagtgaggcctgtatgtgacccggggcttacacctcctgggggctgtgttggctggctggcccctgaggtgatggggcacggggaagggaagtgtgatccctggtgccagctcatgtttccggggcctggagcccacttattctcttcttcatggggctctgctgggtctctcttgctgagtgtactgaaactctacagatcacactgaggttagagtttcattttttctagtttcagtataagcagcttgcatctttacgtgacttcattggccttagagcaaattaaacatcttatttctatttagccttagtgttgcttctgtctttggaatttttgctgtatattgtctgttttctctctgaaaagcagaagcatacagtgaaagctcactgaaatgagttcctatctgtcctgagtgtatgcttactatccacttgccctgaaaggattctccatttggatttgggcaggttctggattcaacagggttgtagcagggcttaacattgtatttattagtatgtggcattcctattttatctaattataatgcctccagccattgagataagaggatgagaacaactctgaatttttccttctcaaggtccattttctcatctttctgtttctttctctagtacagatgctccttgacttacagtgggattatatcccgataaagccattgtaagttgaaaatctcataagtcaaaaatgcaggcaatacacctaacctaccaaacaccatagcttagcctagcctaggttaaatgtgctcagaatattgcatgagcctacaattgggcaaaatcatctaacataaaggctgttttataataaagtgttgaatagcttatgtaatttattgaatactgcactgaaagtgaaaaacagaatggttttgtgagtactggaaggacagtttctactgaatgcttattgctttcccacgatgataaggttgaaacattgtaccatcgcaggtcagacagtctgtacctgcttttacttctagccttgtacattgttctcaagataacttacccctggcttctcccctagggttatgttgggagtgtaggcccgaatcactggtcccactgaccctccttcctccactgccacgcacaacaatttgaggttttgagcagtgcccattagctaaactgaccattgctctaatgagatcctagtgctaaccccatctggagacaaattttcaggcctgtgttatttcttcctgttggaggggctggcctttcccttttggtctgaatctggcttgtgaccattttgatgatcctttggctgcagataactcttgtttcttgcaggtgtgccctgggaatgaccttatgattcttagagtgttctttttcattaggctctttgctgtgccctgctatgccctgaaacaccattttagtatggatcttggaaaggcccgcagtctagtggtagtccaccaaagtgggtgttatcaaggactgtgacaaaactccttgtgagcggtgaaagcaagtgcatgtgctgagcaccaccagtatagcacttctatagacagctagttatttcacttattttgcttttaggcacaacggaattaagcaaatccaggtttggaggaaggtggtgttttaattggtacttataggtgatgcccattagggggcgctgcagtctttgcaagaagctgctcagggttactgaagaaagctgagaatgatttcctgtgattgatttacacaggtctctttgttccctcctgctctcctttttgcctccttctctccctcctgtggtcctaagcagaaacgggtggatgctttgccatttttacttgtgtatgttgtggctgtgctgtcttcctggcccttggtaattaactatggcaaagggcctgtttacctcttggtaaacacaatggatggtatgtgtaaatcactgtggtacttctaagccctgctccaaagttttcaccttagagaaaaagacacaggtatttctctttccttccagtgtccctggtgattgtttcttacacaaaaagcttccatattgttctttctaggcttttttggccttaggaaggcttctacgatgagttctttttgttgttgtgtttcctttttgtttttttttccctcagttacttgatgtcccaaggttggttaactggtgatggatacaggcctgctccttttgctgttcccttccttacaaggtggcactggaaccaggttcctgcacttctggagcaaagaagggtggggaaagtgggacttagtgggacatctgatataaatagctttgtttggcttgaacatacaggcttgttttgaagttgttgccattgggcatccatctggttccagggtctatgggaatgaccgacttatcaagatagaatactgagcagtgaagcctgttttaagagagagattatggatgccaaaatgctaatgcgagtagctcctaaaacatgagaaacatctttccatgcagattttgcttgagctctcgcgtaactcagcgttctgttctttgactttctgaaatactcctgttttaacaacacagtgaacaaacctgcaagccagggaatgaacctgcaggacagctcttgttttgggtcccccactgcctttagtcggaacactgattctcaagcatgaccagggctttggaatataaacagtgctaaaggccctgcaggtacaatggcaaatatctcttcagctttcagttttccttcatcaggatcatcctgtgtcttcctgaaattgtttacccatgatctaacttatcctgtgtcaccttttcagtgactttcttattctagagcaggggttggcaaacgacagtccacaagcgtctgtttttgtaaataaagttttattggagcatagccacactcatttatttacatatcatctgtggctacttttgcattataatggcagaattgactgcaaagcctaaaatattcactatatggcccttaaaaagcttcttttccttttaaaaatgggtttagatgggctgggcacggtggcttacgcctgtaatcccagcactttgggaggccaaggcgggtggatcacaaggtcaggagatccagaccatcctgggtaacatggtgaaaccctgtctctactaaaaatacaaaaaattagccaggcgtggtggcgggcacctgtagtcccagctactcgggaggctgaggcaggagaatggcatgaacctgggaggcggagcttgcagtgagccgagatcgcgccactgcacttcagcctgggcgacagagtgagactctgcctcaaaaaaatttttttttcaaatgggtttagatgaaatagagtttcatataatacttattattgaaggaggcaaccaaggataagagaacaggttgagctttttgctaataaatgggagtagaccagtatcagagcgttaacatttcaacaggaattaacatttttgtccttgattactttcctcattacttcctcagtaactttgatttgttagaacaaatttcacaggttgatttcttttgatccagtgtttcttctttctagagtagactgaaaagtgaaccactgattttcctaaggtaaagttttatgtatcagtattatgaaggaaattttctaacaaggcagttatgtgttctcagtactggcatttctcactgtggtctaggatatgaaagaggtgtttatgatctctgctacagacatcaaaaaccatagagcatgctaattgaattgtgtatgtatgcacagagttctccatctgttcagagacgaaaccttgactttagtctctcaggggagttccatacattatttttttcatttctaagggctaagatgagggcaaaccaaaaaattagatacttaaaaaagagatcgcaaaatatttatttttttctcttctgcagagggaacgtccaccacctccagcaaagccaccgcccgatgaagaggaagaagaccacatagataagaagtattttcccttgacagcttctgaggtagagggttgtgggtttattccccattgctgaaatttgagtttgttgaaaagtgcatcgatgtgtgctttaaaagactttgctttctcatcttctcatcagctctttggattataaatttgtattatgtgtactagtaatctggaataagaccttccaaactcacaaagaattttaatatagctctcgcagacaggcccagtattgatctgccataccacacggaaagtaaaatgtacattttttcctggctccaataagctgaacagtctcactttttgcttttaagcctcttgtcttttgatacaagatgtagagcttccctttaatcactgttccctagactgtgcctcattagcaagctttagtgcttctgccccaaacatcttattcctgtttttgtattttttcctgttcgtttcacatgaagactctacaccaggacaaacatgaattgagccatgaagactcaattagaaaagacataggagttatgtgggatggccagggctggaagatcaaagaagtttatttgaaaagaatagtctacccttttgaaaaggaaatgtcatcatgaggcaaataactcaatcacttagaagtgtgaaaaaattgtgttttccttaatctttcatcttcaaaatgctctgctaacacttcctgccattagaatatatctatggaatatttattgaaaatattacataattttattagtcattttgtagctcattcaatgccctattctctaatttaaaaatcagctaatataaaacagttaattactctcatcactttgtccctagaagttcgagttattgattttttacagtattgccacggaccatggcaggttcttttattcagtataaacacatggaaccagaaggatggctttagtttaacaaaatgtataaatacaaggaagcccttttaaaaacgtaaaagtcagtgttggagataggggaagatttctatgctaggtacaaattctgtccttaattctttcctttagttacaaaatgcttattataatgtctcatctaagggtttctagatttgcagcctgttattaccacctctggataataacacatttctagtagatccaagtgtacgcagtaaatccttccatatttttatataaatagaagtttgtctcattacccccctccttttttttttttttttttaacaaggagaagcctaataataagaatattcagttggggctggttctctgtaaatgccttctgcccctctttaacaagcacttgagttaaaattcataatgcttgggcaaggctcttaaagaaacactggattatacccagaactttctattctcccaaggttttctaaagcattcaatgtggcaataacacagtgtcaagaagtggtggctgggagagagaagggggaaatcttcatattactctcctagatgggagagtttgagatacattttctaaaacttgcttctgaatagcctggaattctggatcagttggaacagcatagtcagtatttggaagatggtgaaacactgaatttgctaatttactggtgattataggtacctgaatacagaggtgatacggcctgcatatgatccaggcagattttattcatatgctgtagtttgtagtctgaatggtcttcttcaaagtgtactattatgtatattttttggactttgttgtctttccctgtctttccttatactgttaaagctttaataccctagactctatcatatctcaggagacactgacttcatcaaacttaggtttttgtctttggcaagctatctgccccaatatttgtattcctattcctaagcctggtcattgtcagatgactcatagaagcctttaggagaagccagagtatacctagctctaggagtgcttatcagattaatgacctgatcatgaaactggcttaaaaacattagacacatatactcacacacatacacatgctgtgtagatgtttttgcccacagaaggggctgccagctgcatcaggactggccgtagtcttctctgtgctcagatatgctaaatattcatggaagttgcagctgctggagtatctcttcccagaaagctcccacaccccaactggacattccattggtcactgttaggtggtgactgctcatagcttttctctgcagcagaaatgttgctttccacatagccgggaaaaaaaaaatatatacacacacacacacacacacacacacacacacacacacatatacacatatatatatacacacatatatatacgtatatacacacacatatatacatatatacacacacatatatatacacatatatatacacatatatatacatatatacacatatatatacatatatacacatatatatacatatatacacatatatatacatatatacacacatatatatatacacatatatatacacacatatatatatacatatatatacacacacatatatatatggctttgatttattgccagccctggaggaaaggaaaaaaaaaaaagattaaggagtaatttagtaaagagcagaatcctttctgttgaaaatcagttattgccgtattgactatgacatagggcttctggagtgggagctaggaaggctcaaagaaaagcagtttattgctttattgtgaggatttttaatcccatagctggtaggagccagcaccaagaagaaatgatcactctacttgtcgtctgggtatgagcaattggatgaagaaaaaaatgaaagccagaagaaaatgaggccatactggtccaggatcaagggaattgacttttatgcccatggctctgttgtgagctttctgtataaccttggacaagtccccagacctctctgggaaccaggtttgtcatctacgaatgaaagagcagaaccgggtgctctctggctgttactgtgatggttaggatcccttccagctctggcatttgatggttctctgcctctatttgtcctgcacaagaactaggcacagagtgaaagcaggtccagtgggcctgattttccacatggaagtcatcagccctctgctgcatgagaagaaaggatattataggctgggcatccaggctgtcaattacctacctctgaaggaagcatgccggaggctatatgagagttcttcctgtgtgcggaacactcactgaatcagatttctagggctctgtgtaagtgatagctgtaggtgcgtaaacctgcagaacacaaattcctgcctgtgatgcctgtggtattaagttgacacagtgtgaactgcttaatggtccctctttgttcccttaattgtgttcctatcaagaggcaaggaataagtaatatgagtaaatggctcattgtaatgaaatagcttttagcttccaggtagcttgctgtaagtggaggttcctgctgtgcttagcagaattttggaaggaaactgtccttttgcctttagagtggcagccttgttaacaaacaggagctgcagtttcttgtttagtctgacgctactagagtccttgttgtctcattaggcacataacacagtgagctatgccttgagaagcaaaaacccgatgaaccacaaacctgatgcatttccagtgggctaagggacatgtcagtatggaaggaaatctctgtgtttgccaaggaatcacatttttagggtagcattatttgttagatggaattgggaattccccctactcccacccccttgtttgtaatacgttacttgtcctagccaaactgatcaagaagagatcttgagccttggtttgctgttctaataagtaggatttgtcttaatactagcttattcttatttttcttcttattttgcctgtgaaacagtttggattcttaggacaactgggccagaattatcctctaaagcaaggacatccattgtctctcacaaagtggctgtagcactaattgtggtatctacagcttgattcaagggaaagcgtggctactctggtaccaagacaagccgtggccatcaggccctcagctggtcaaagccttacagttgccaggtgtaggagccagctctggttccgttatttcatcagagacacttgactgcctggattaggaatttctcagtagacagctgcttttccccctccacactgaaattcaaactttctagccacttgactcttcagagcagagattggtggaagtaatttaaaattgtattaacataaaggttgtaggaatccagttttggggatatccttcccaataaccctcaggacctctgaagaaaagctcacaaaaatagagatggacttacagacaagtttgtttctagtaaacgtcaaatgttgagggtcagttggaagtcattttggtttcctcttgaggaggtgggaaggattccagtctttggatagtatatgtgcatattagaaaagaaacgtggagaaagaggtctgccttcacgatggagcatggctaagagctgcttggcaagtattagcctcagaaaagagattatgcagaacactgtaggcatgggagacgcaagaaaggaaggatcctggattttatttagcattttttgaagactaaaatcaaagaaaagggagttttttgtttttttgtttttgtttttccttagagacaggatcttgttctgtcacccaggctggagttctgtggcacaatcctggttcactgcagcctcaaacttctgggctcaagtgatcctcagaaaggggtgtattctaatcaaaggcctttcagattggaggtatggatatatatccagaaatgcagttgtgattctatgtgacacttgaattattcaccttctcttttccacctttcttctttgatgaaaaaagagccaataatctcgaatttgttccagactgcctgtcttggtattagccacatgcacaagatacactggatgtttctctcccttaggttctgtccatgagacctaggattcatgggagtgcagcccgggaagaagacgaacacccttatgaactgttgttaacagcagagacaaagaaagtggtgttggtggatggaaaaacaaaaggtacgttccccacaactcctggcagaaccaactccaaagggatttttaaagtttgtgatcctgagtggaaggggaagatgtcgtaactatgatattccttgggttgtggtggttgggtttcacgatgatctgggatggtgggtccattatggcttttcatttccaatacctgacctatatgctctaggttggagttggctgccaccttcagtatgcgaagcaaggaaaaggttaggtcagactaggtgctaactgtgggaggagagaccaccagccccacggcagagattgatttggggtctcaaatcataaaccctcaagttaatgctgtggaaaaacaagctcaacaagtcagtccctttgggttcaggctgacggcacagactctgcttttgagtcctgacctcagagtgagacactcctggggaggggcccgtgattggctgccaccctgtaactagagtgctctgtcgccttggcctactttcattgcctctgcaaaattcagtttcctctgtaagggagtgagtgctgcagtactgagatccagcccgtcgatataagtgcagtcacgacagaggtgagtgtgcactgctggagaatttgtgtcaacccctgttctaaggaagaatgataagggacaatgcagttcccactgcagtttgaaggaactcttgtgacctttcccagctctctacagcttgcaggtattagggccttcatggggtatgcgtaccttctttcaaccctaagacattccatggttcaggtaagaacagaggatgagatggtttcctttgaaatgccctttgctgagatctgtcagtgggtagagggcggcaaagagaatgtgtgcatatgcgtatgacattgtagactttatttttaatggtcctgtttaaaaggttttctcttgcatgcagacattgtggtcattttcatagtgtttttttttgttttgttttgtattttatggtttccattcggagctttttaaaaaagttataatttagatacagtaaaatttatcctttttggtgtgtagttctgtgaattttgacagatggagttgtataactgccatcacaataaaaatatagaacagtttcatccccaaaatttttccatgttcttttgtagtcaacccctctaccttcccttatttctcacaaccactgctctgatgtctgtcccaatagttttgccttttccagaatgtcatataaatggaatcatacaatctgtagccttttgagcctggcccctttcacttcgctaatacatttgaaattcatccatgtcattgcatatatcaataattcgttccttttcattgctactatcccattgtgtggatataccccagtttatcccttctctagctgagggatatttgggtcatttacagtttttggcaattacaaataaatcactaaaaacattcacttacagatttttgtgtgaacagaagttttcatatcacttagatatgtacctatgaatgggattgctgggtatcccagcaatagatgtttaactttatatgaaatatataatatgtttaactttataggaaactgccaaactattttccagagtgattataccattttgcgtttccatcagaagtgtatgagagtgatatacatctacttgctatatatatcatccctagcacttaatattgtcaggttttaaaaattttagccattctagtagatacgtggtgttagttcattatggatttaattttcattttcctaatatctaatgatgttgagcattgattaatgtgattagttaccatccttaatatctaattaaatgtctattcaaatttttgctcattgaaaaaaattagattgttttcttattattgagttgtgaattctttatatattttacatacaaattcttcattagatatgtgattttctcccaatctgtgacttgtctttttgttgccttaacagtgtcttttgaagagaagtgattcttaatttcaataaagttcagtttatcctgtttttaaaaaatggataaggtcaccaatctttttttttttttttaagacggagtcttgctctgtcaccaggctggagtgcagtggcccaatctcagctcactgcaacctccacttcctgggttcaagcaattctcctgcctcagcctcccgagtagctgagtccacaggcgcgtgctaccacgcccagctaatttttgtatttttagtagagctagggtttcaccatgttggccaggatggtctcgatctcttgacctcgtgatccacctgccttggcctcccaaagtgctgggataacaggcgtgagccaccatgcctggccaccaatcttttctattttttttgctaaaaattttatatctttaggtcttacatttaaatctatgatcaattgtgagttaatttttatatatggtgtgaggtatggatcaagtttcattgttttacaaatggctatccaattgtttctgcacaatttgttgaaaaagaccttcctttcgctattgaattgtctttgcaactttgttacttttttcagaattgttttagatattctagttccattgtctttcccatttagaatcagcttattgatttcttctccatccccacacccggttcttagtgtgcacagcttgttgatttctacaaaaagtcctgttgggattttgtttgggattatattgaatctatattgattgtgaagaattgataactatattgagtcttccaatcatattggtagaatttttttttttttttttttgagacagagtcttgctctgttgcccaggctggagtgcagtggcatgacctcagctcactgcaaccaccacctcccaggttcaagtgattctcctgcctcagcctctcatgtagctgggattacaggcatccaccaccatgcctggctaattattgatttttagtagagatggggttttgccgtgttggccaggctgatctcgaactcctgaactcaggtgatccacccgcctcagcctcccaaactgctgggattacaggtgtgaggcaccaagcctggccatattggtagatttttaattaaaacatttagaaaaggtgaagtagaacactaatgccctctctagtcattcgataataaattatgcttaaaaaactaacccttaaaaaacaagcaattaatgaatgctgtgtttgaaaatggttcatagtgaaggaataatttttagcatcatggaggagggagattccagttctttctttctttcattcaaaggtttcatctggaaccactacaagataattgactcaacctttggaagaaagaaaagtggaaagttagactaacttcataagtggggctggtgtccttagctaccaagtgtgcctgaaagggattttgtatccccatatcaagagatcgtcaggttaaggaaggaactgccaaggaggacttttggctacacatctggtcctcctatgctttggtttcttccaattctgcaatattgggctaagtgttgagagtgggtggtatagaagcagatttaattgaaccacaggctgtgggatgcgcctgcctcaaggcttgctgtttagatcactcaaagagctttcagacaaaatacctgagacactgaatatgaaaatgggctctgctagtttcttagaagccttgcctatcctggcagcctggcaggaaaagctagcctagaaggagtgcctgctaaggttagtataagtgaggtacatcagcagaccatgtggtaggtattactgaatcttttctgtatttcctttaatgtcattgtcttatgcagcttttatgaattaattaatcagttttcaaaaggccatgttagtgagactgtcagagcttttaacccctccttagtataattaaaaaaactacaatgtgtgagggtggtgagggaagagagagaccctctcatattgttttatactcagaaaagaaaagagaagcaaaactaaaggcaggtagcctggcacctaggaacagacccaaaaccaaggaaccagacccgaaaccaggcctgggcctgcctgacctaagcctggtagttaaaattctacccctgacctagcaactgatgttatctctagattatagaaagacattgtaaaacttcccggtctgttctatttcactctgaccaccgttgcatgcagcccctgtcacgtaccccctgcttgctcaatcgatcatgaccctctcacacggaccccccttagagttgtgagcccttaaaagggacaggaattgctcactcggggagctcggattttaagacactagcctgctgatgctcccagctgattaaagccactcccttcactatcttggtgtctgaggggttttgtctgcggcttgtcctgctacatttcttggttccctgaccaggaagcgaggtgattaacggatggttgaggcagctccttaggcgactttagcctgccctgtggaacatccctgcgggggactccaaccagccaaagcaacgcggatcctgagagtgctcctgggtaggcacttgccctgatgggacgccttgccagagcagtgtgtggcaggcccccgtggaggatcagcacagtggctgaacaccaggaaggaactggcatttggagtctggacatctaaaacttggtaagacttgtctttggaacttgcccactccatctgagtggaagcatggcctgatcatccacggtgtgcctttatcggcactttggttttggttttgacatggtttgaattccttgacagggttggtcttgggaatttgcctctaccatttgagcggaagcatggcctgatcacccatggcgtgcctgtaccggcactttggtttttgtttttgacttgacttgggttgcttgatactttggttttggttttgacctggcttggatttctggatactctgattttggttttgattttggtttggtgtaaactgcaaaagtgtgtgtgtgccctttttacctgttctttgttttgtgcgtgtggtgtgagcgtggtgttttgtctcaaagaagcatgggtcaggaacaaataagcccaccctactaggaactatgttgaaaaatttcaagaaaggatttaagggagattacggtgttactatgacaccaggaaaacttagaactttgtgtgaaatagactggccagcattagaggtgggttggccatcagaaggaagcctagacaggtcccttgtttcaaaggtatggcacaaggtaacctgtaagccaaggcacccagaccagtttccctacatagacagttacagctggttttagacccccttccccgccacagtagttaagagaacagcagcataagcggctggcagaggcaaggaaagaccagcagagagaaagagaggaaaagacaggaagagacagagagacaaagaaggagtcaagaaaagagaaagagagacagagaaagagagaggcagaaagaggaagagacagaggcaaaaggaaagtcagagagagagagacagaaagtcaaagagagaaaaagagaaagaaatatacaagtacttaagaaaaaaacagtataccctattcctttaaaagccaaggtaaatttgaaacctataattgataattaaaggtattcttcgtaaccctgtaacactctaataccactttgttgtcagtgtagtcagtgtaaacaagggcgtatcccgaaagcactgaggccttcctatcaaaaatccttaacccagtaacccgcagatggcccagatgcattcaatctgtagtggcagctgctttgctaatgaaaaaaaaaaaaaagccatctataccaattctaagttaatttagactaaacaaggtcttattaatagcaaaggataattgaaatcccaaactaacaaggttttcaacaaaagtaaagtttgctaaaagttaacagtgtaacatgtattatagtaacttctaatcttgtggccttagacagtctagtccacagacgtaaagaaagttcacttaaaaaaaaaaaaagaatggttatcttcaaagaaaaaaaagtggagggaggcaaaatttatgtaaaaagagtgttatatagtaaattcttgtcctgaaataaattaaccggttgtttaaagaaaaaaatgtttgtaataagtcagaaagttgagacatgttgaagaattatctgtgaaagtcatgaaagaaaaaatgttataaaaaaatttatgcaaaaaatgttgtataatttaaaagtaataaagcctcctgagtactattaaagaaacagtttatgtgcaaggtgtataaggaaagtaaactatacctttggtaaaaggattataaggaggcataagaatgtggatttttacctacattaaaaggttaaaaaaaattattgctttgaaagtttaagcaagttttaaaatgttaattgtaaaaaaaaaaattctgtgtgtaaacatgttagctaaagttaaaaaggtatcattcagtttttctgtgaactggacattaaagtaaaaatgcaacaggtttttcttaaagcaccaacctgctctttaacaaaaattatgaaaggttaaaaagagtctataaaaacttaccttatggtcaaacatgaaaaattggataaatatgtctacaaggttttattaaaattaagtttaacgttaataacacactaatataaaggtaaaatttagcttatctggtataaaaatcatataagaagcattattaaatataaaatggtgtttagctttctttggtctaaaaactaataaaaattggtgctgaaggaaacattcattttactagaggatgatagaagttaaagacttaaaacaaactttggcaattaagacagcataccaagatgcaaatgcctggttggaatggatcaaatattccatctgcacattaaacaaaagcaattgttatgcttgtgcacatggcaggccagaggccctgattgtccctcttccactaaggtggtcctccagtcagctccatggtagctcttttccgggattctacagcctggagtaataagtcatgccaagctctctctgctatatctcaaagtccagcaccctgcggggcagcccctgagggccatccagcttccatctcccaacactaggttcacttcgtgtctctcacgacagggaagaaatttagcattccttggagacctgaaaggatgcagtgagcttaagaattttcaagagcttatcaatcagtcagcccttgttcatccccgagcggatgtgtggtggtattgtggtggacctttactgggcactctgctgaataactagagtggcacttgtgctttagtccatttggctatccctttcacgctggcatttcatcaaccagaggaaaaaaaaaatggcagttggagttttaacccagactgtaaggccctggccaaggccagtggcctatctctcaaaagaattagacagggtttacaaagtctggcccccatgtctaagggccctggcagcaacagccctgttagcacaagaagcagataagctaactcttaggcaaaacctaaacataaagtccccctgtgctgtggtgactttaataaatagcaaaggacactattagctaatgaatgctagactaactagataccaaagcttgctctgtgaaaatccccgcataaccattgaagtttgcaacaccctaaacgccaccacctcactcttggtatcagagagcccggttaaacataactgtgtagaggcattagactcagtttattctagtgcgcccaacctccgagaccatccttaaacatcagtagactgggagctgtacgtggatgggagcagcttcaccaacccctgcaaagtgactctgaagaagacgacaagccctgcttcagttacacccggaagctgactggtccacgcatggccgaagcatgaggaaactcatcgcgggactcattttccttaaaatttggacttatacagtaaggacttcaactgaccttcctcagacgaaggactgttcccagtatatacatcaagtcactgaggtaggacaaaagatagctacagtcctattattttatagttattataagtgtactggtactctaaaagaaacttgtttgtataatcctattatatccaaggtatgtagcccagtctctaaatgttatgtttgtggagaaactgtaatagaagatcaatggccataagaagcctgagaattagtgcctacagacccagttcctgatgaattcccggccctaaagaatcaccctgatcatttctaggttctaaaagtctcaattattagacaatattgcatagctagaaaaaagaaagaattcactcattctgtaggatgacttagttgcctaggacaaaaactgtataataataccacaaaaacagttacgtggtggagttcaaaccgcacagataaaaatccattcagtaaatctccaaagttgcagaccgtttaagcccacccagaatcccaccaggactagacggctcccactaggctatactagatatgtggacatagaacctacgctaagctgcctgaccagtggacaggtagttgtgttattggcactattaaaaccatctttcttcctactgcccataaaaacaggcgaactcctaggcttccctgtctatgcttcccgcaaaaagaaaagcatagctattaaaaaattgaaaaataatgaatcgccccctaagcgaatcatacaatattataggcctgctacttaggcactagacagctcatggggataccagacccccatttacatgctcaaccgaatcatacggttgcaagctgttttagaaatcatcactgataaaaccggtcaagccttgactattctggcccggcaagaaactcagatgagaaatgctgtctatcaaaatagattggctctcgactacttgctagcagctgaaagagaggtctataaaaaatttaaccttactaattactgtctacacatagataatcaaaggcaagtagttaaagacatagttaaaaatatgacagaactggcacatgtgcccgtacaagtgtagcatggattcgaccctgaggccatgtttagaaattggttcccagcactagaaagatttaaaactcttataataagagttataatagtaataggaacctgcttactgctcccttgtttgctacctgtacttcttcaagtgataaaaagcctcatcgctaccttagttcaccaaaatgcttcagcacaagtgtactatatgaatcactatcaatctattgcacaagaagacagaagtggcgaaaataagagtgagaactcccactaataaaaagtgagagtctcaaagaggggaaatgagggaagagagaccctctcatattgttttatattgttttatactcagaaaaggaaagagaagcaaaactaaaggcaggtagcctggcgcctaggaaccagacccgaaaccaaggaaccagacctgaaaccaggcctgggcctgcctgacctaagcctggtagttaaaattccacccttgacctagcaactgatgttatctatagattatagaaagacattgtaaaacttcccggtctgttctgtttcactctaaccaccggtgcatgcagcccctgtcacgtacccctgtttgctcagtcgatcacgaccctctcacacggacccccccttagagttgtgagcccttaaaagggacaggaattgctcactcagggagctcggattttaagacactagcctgctgatgctcccagctgattaaagccactcccttcactatcttggtgtctgaggggttttgtccgcagctggtcccgctacagtgagatgggaaattttttaaattacatttttaggctgggtgcagtggcttactcctgtaatcccagcactttgggaggccaaggcgggtgaatcacttgagcccaggagctggagaccagccagaacaacatagcaagacccccatctctaaaataaaatttttttaatttttaaaaattacatttttatattatcttattagtatatgctcactgaggaagaaaacatttcaagcaatacagaaatgaatataaataaaatgttaaggttcttctcacctccctgttactcatagttgctagaggtgatcatttgaaaacgtggtaggctgggcgtggtggctcacacctgtaatcccagtactttgggaggccaaggaaggcttacttgaagccaggggttcaagaccaacctggcaacatagtgagaccccatctctgcaaaaaaaaattttttttaagtaactgccttttaatagcaaaataataccatcctaatctaaccacagagttaaaaaagaaagaaagtgtggtgtatatgattcagaccatttgttatctttatacaaaagtgactatgtgaaattctttgtttgtatttaagctaacgtgggattatattttacaaagtttttgtgaacttgcattttgtatttgccttgtctatagagcacagatacaattttatcttggtccttaaaatctagctaaatatcccataactcattttttccttctccaggatttctgttataaattatgcttctgtggacattctgtacatgtgttcttaaatacttataaaagtatgtctgtaaaaaagattgatagaaagtagaattagcgggtcagagtgtatgtgcatgtctagatctaatgggtggagctaaattgccctcccttaatggtgaagagaagtatgctcttctccataccttcccaacatggtgtattatcagtctttaatgttttccaccatgttaagcaaaaaacgtgctatttgtcattgaaactgagcaacttaccttattgattagtgttatatgtttagtctatgagttgcctgtttttttctatttttctacatagaaattagtggtagtggaaacactttgtgtaaatacctataatacttggccaaagtagtactcagaggaaagtttatattcttaaattcatttgttaaacaacaagaaagattaaaatttaaccaaaagacagtagcagagagtaactaatagattgttagggaattattgagataaaagcagatagtatattgctgatattttatgttatgtgtgctacaccttagtgaaagaaagaaaagtaaaagtaaagaaaccaaaaggagagacttgatcattaaaatgaatttgtatttttttaaagatttctgacaattttgatcaagaaagaggaaaaaaccgctacatatgaagatgctataaagaatattgttggccgggcatggtggctcatgcctgtaatcccagcactttgggaccccaaggtgggtggatcacttgaggtcaggagtttgagaccagcctggccaacatggcgaaaccccacctctactaaatatacaagaattaggccgggcgcggtggctcatgcctgtaatcccagcactttgggaggccgaggcaggcagatcacaaggacaagagatcgagaccatcctggctaacatggtgaaaccctgtctctactaaaaatacaaaaaattagctgggtgtggtggcacgcgcctgtagtcccagctactcaggaggctgaggcaggagaatcgcttgaacccgggaggcagaggttgcagtgagccaagatcactccactgcactccagcctgggtgacagagcaagactctgtcttaaaaaaaaaaaaaaaaaaaatcaagaattaggcgtgatatcacacacctgtaatcccagctactcaggaggctgaggctgagaatcgcttgaacccaggaggcgcctcttttttgaggctctgtctcaaaaaaaaaaaaagaatattcttaattgtacattttaaaataactaaaagagtgtaattggattgtttgtaacataaaggataaatgcttgagagtatggatgccccactctccgtgatgtaattattcctcattgtatgcttgtatcaaaacatctcggccaggcgtggtggctcacgcctgtaatcccagcactttgggaggccgaggcgggtggatcaggagatcaggagatggagaccatcctggctaacaaagtgaaaccctgtctctactaaaaatacaaaaaatttagctgggcatggtaatgggcacctgtagtcccagctactcgggaagctgaggcaggagaatggcatgaacccgggaggcagagcttgcagtgagccaagatcgcaccactgcactccagcctgggtgacagagcgagactccgtctcaaaaaacaaaacaaaaaacaaaaacaaaaatctcatgtaccctactatgtacccacaaaaatttaaattaaaaaaaatttttaaaattaaaacttcaaaaaagaatatagccaggcacagtggctcacacctgtaatcccagctcttagggatgcagagacgggaggatagcttgagcctaggaatttgagacctgcctgggcaatatagtgagaccctgttctccacaaaaaagaatagaaaaaagacaaaaaagaatatataacctcaaattaagagattttaaaaattaataataagatgatttataggaataagttttatgtggttaatcagagttgctgccatcccctgggagcatttagaattgttttgggggcgttttggtccatcacagtgactggttaaggtggggttgctactggcattttgcgcctggggaccaggaatgctaagcatcctgtactatgcaggacagtccttcacagtgagtaattttcctacccagaaatgccatttgtgcctatagaagaaacaaaagctggcagaagtggaaagccttaatagatctatgaagtagaaagcccatcctccaaaaagacacaaggcccatgtgattttatggtagttttatttaactgggtattcctgttgaattatttcaaaagtagaaaaagtcttctgaaatcatcatacagggcaagcataaccaagagcagtgattcctgttttgtatagcgtagtcatttatttctctttcatgtttaactctttgctcgctggatgttctggacatattaccacttggagaaatagtggacaactttccatgtttgatagtaaatgggaatgtagccaagagctctaaaagccatcttgttctttgtggtgcttttttgtagcatccactaatagtgcttgggtccaggtgaagtggtacttaacagaggacaatcatgaatgattatctgaagacagtgatacatgtggactttctggcgtgcagttacacttcagaggtttttgagattaagtcagtatttctgagagctacgcatttgagtctgtgcacagtttgtgcatgagtatgaagaccttaatccttccaaaggggaggaaacggtttttagcttctacctctactcctacatcagagtaccaattccttagcctttggggaattctggagtgtaaatcttggcttttccctttgccagttttggattgttttctcaggtgtgcttccgtctgtagtcccacttttactgttggtttaatgagatttcaggaagaagagaaaataggtacctgtgttcgatctatcatctttaccaagaagtccaggctagattttcaaaataaatacccaggagtatgtttggatgctttttccaaagggaaaacatatcaatgagacagtttgacaattaagccttaacttcagcagcttcctcttctctcgccatcttttttttaaatagacggggtctcgctccattgctaggttggggcacagtggcacagtcatagctccctgcagcctcaagctcctgggctcaagcaatcctccctcctgccttagccccctgaatagctagactaaaggcatgtgccaccatgcccagctaaaagtgttttttagagatgggttctcactgtattgtccaggctagtctcaagctcctggcctcaagcaatcccacctcaacctcccatgtagctggggtcacaggcacaagccactgcactggacttttctcaccttcttgcattagaggagctcctgcacaaagtcctgctgaataactgtcttcttattattaatttaggtttctgagttggaatagttcaattttctttccattgtggaacaagtccaagccttatgaactgtgcttctaagttttcctccaccatatgtattgacagccatttatatacatgtatattatgcatttatatatatgagacatatgtaaagtaactgaaagatgacagaatatgttaaattcatataaaagtgattttggtgtccaaaagagggataaattatgtcagtgtaagagatcatggatggctttattaacgaaatcacacttgagctgaacccctagatagagttatacctgataggcagaagtaaggaaggagagagcattccaggcaggaggagtggcatagacaacagtgagatgatgggaggagatagagagaacatgtctggagaatggtaagagtaatccggtttggctggaacaaagggaacttgtcatagagcattggatctccaccgtcagtgtttattcccgagacaatgcagtgttgttgaggctttttgaatccggcgacaggacaggagccacgcttcacaaatatacaattgtggactcttagattggttagactgggagagactggaggcgggaatgccctaaagtcaagagacttcacagagtctctccaaggtaattggagcccagactagagggggagtaggaagttataggaagggaggtatgaatgggagaagtatagaagaagcagaattaacaggaccatggaacaaaatgtataggaatgaggagaggaatttgaggatgattctgaggtttgagcttggttaattgagaaaataatgtacaactaacagaaatagagaattgagggagggggcatgtttgagggatgatattaaatccggtttcaaatgtgttaagtttgaggtgttttaggtaccagagaacatccaagtgaagatacttcataaacacttggaaatatgagtctgatgagagatgtgaaggttagaaatacagatttaggagtcatccaagttgaggtgattcttaacgttaaagagaacccaggctgggcgcggtggatcttgcctgtaatcccagcactttgggaggttgaggtgggtggatcacttgaggccaagagttcaagaccagtctggtcaacatggtgaaaccccatctcttctaaaaatatgaaaatttactgggtgtggtggtgcaagcctataatcccagttacttgggaggctgagtcatgagaatcatttgaacctgggaagcagaggttgcagtgaaccaagatcacaccactgcactccagcctgggtgacacgagcaagactctgtctaaaaaaaaaaaaaaaaaaaaaaaaaaaaaaaagtccattgctgagagacgagagagattgaagaggtccaaaacagaacttagcctgggcaacatagtgagatcttgtctctacgaaaataaaaaatttttaaaaattagctgggtgtggtggtgtgcacccgtagtcctagctacttggaggctgaggtggaagaactgcttgagcccaggaggtcaagcctgctgaactccagcctgggcgacagagtgagaccctatctccaaaataataataataattttttttttaaagagtagagcttatgtttagaggcacaaggggaaagaaacataggaagataactgggataatgcaatatcttaggagctaaggctgaatgtgacagaaaaccctcaataactctggttgaacaagatagaagtaaagagtgctgggctcaacaacagttcatgaccattaaggacccagtccctttctgccatctcatggttcaagatggctatccaagttcaaggcatcagcatgggaaggaagaaaggggagaatggcactttaaagatagttcccaaaagttacacatgccactttcacttataacccactggccagaacttggtcatgtgtttacaccttgctacaaaggaggtgggaaataattgtctttattctaggtggctgtgaacctgtctaaaagtcccataaccaaggaaggaaggggagagtgagtactgggggcaatggacaaacagtatccattgatctagaaagagctagaaggatgaaaactagaaaaagggttaggcagttagaaggccattggtaaagcctaaatggggtctaatttctaaggtaggagagaagtgatgaaattaccccccaatttttacatggtgttgagagtagtcattaaaaaagtttgatctgtcttctcgggaaattggtgtgattgtcctccaaaaagtgcaggtgctgtgggtaaagatgatggcttaaagagagcagaagagatgaggaaatcgatcttacatagttttcaagagatgaatgaaaagctcactgagcctggtaatcaagctggcatttgaattattgctctagcacttactggatggtgactattatttagggaatcatttaacttctttaagcctcagtttctacatgtagaagggatactaattcttacctcatggttgttgtgaatattaaaaagaaaatgcttggcatagtgtctggcacagaaggagtagtactcaataagtagtagctgttggaagccagctgagttaggtgaattggtagaggactcaagtcagttgtttcttgagtatttaaaagggctcaacattccagcaactggagaagagaaagcaaatggctatgaatacccactacaagaactggcagaagatcaaggggagcaaagacagcaaatatgctattaaattaggcatggttagaaatcgtggctggttggaagctgatccaggcaaagctggtatattgaaaactagggaagtttgggggccagaggtcagaggtccaatgacaggtagagaacagacgctttaggagttcaagaagaagggggagatgtaatgaggtaatcaagaccaagtcaatgtgaaacagtccgaagtcccaaagctgggctatacctatgggccccaaggtgagtacagatggctcctaatctgaagattctccactgtgctattacatgtaatcccaaaccaaacttataagaatactggccttccctggcatttgagttttattctgcctctttaaaagggctactcagaataaatcagtctcctttgcagagtcaggagaagggaaaccagcctctctgtgcagtgttagcatgatgagctaagagttcagaaatgactgtaaatgaaaaatggtgataatgatagcagctatcatttactgaatgcttcccacgggccagctgccatgctgatttcctttatgttgattatgtcattgtatatcttgtgacagatcttcagggtaggggctatttttgtccctgtttcagagctgaggaagaaaaggttaggtattggagctgagacttaaaccctagtgtgactgaatccaaagcctgtacttttaaccatgaggctaaaaccatttcatcaaaagcctttctgctattcatgttcttaacatcatagaactggtagggactatagagaggtcctttaatcacagattcaaactagcctaaatcccaaagccctggagaatgcatcccaggcattcattttttgaaagagacctagagaggaaaagtcacggggctggaactaaaacatgggcttcttgaatccctgtctagctcttattctatttctcaggttgccgtggaccaaaatgaactctcagtctatttgtcttatcaaattgcagtcttcagcaagtgtctgaataacttggtcaggaccttccttccaggaagagcctggtgaccctctgaaagcagccatgtacttgggagttctcctgcacacccatggtttttgatgctcactatagtgactaggcagctggaggattccaatcctaatgatacggagaacacaaaacaatatgagacactgggtcccccagccttcttctctgggcctgaggggagatttgaattagcaactcctcacatgagctgcattctttagccttaatttaagtgggcagaggtgaatgaaaatgtgtaaatgttgaagtgttattattcaaaagcccttgagatcccatagctcatcgtagtaattaaaatgcagcacagaagaccccttgcttcagtagctcacagggtataaggaaaatgaatgaggatcacaagttgatgggattgggaattagcatgctggtgtgccatattgagtagaacagctggcctcgatgtatgggtagcataagaaacaggcctccctccctgtgtgccactatctccttgtttctctcctagaagggcagactgtggggagggcagagctcggggaacatgggaagtagtgtaggagaaaggcctaagggtctcttctgcaacttcactagtccctgggcgtgaggtttgttgcccagggtggtctctaactcctgagctcaagtgatcctcctctctcagcctcccaaagtgctgggattacaggcatgtactgccacacctggcccttctctgccttttctaatgtatttttacttctctgtaagcctgacaaggtcttatttctccttcagtgctcagctcgaaagctacctcttctgagaagccttctggttcgaagtaatcaggctttcctttttgtctgccaagcatatgatttatgcctgtcttaaagcatctattgaggcagacttggtgtctttattttttttattttttattttttggtgagacaaggtctcgctgtgtctcccaggctggagtgcagtggcatgatcacagctcactgcagccttgaattcctggactcaaattatcctcccatctcaacctcccaagtagctgggacagcaggtgtgcaccaccacacccagctaatttttaaattgtttatagagatgaggtctcgccatgttgcccaagctgatcttgaactcctgagctcaagcaatcctcccaccacaggctcccaaagcgttgggattacaggcgtgagccaccacacccggcctctttatcctcatatccacctgggtgcctcctgaggacagacacttcatacatttgtccatgggatgagtggttacagtgacagttctggggcctgtctcagagtttctcacttcagccctctcaccatattaccttctgtcccttccttctgctgttcagagttataaggatggtgaaggtaatgaatgcttgtgaagtgctttatatcttacagagtactttcatgtaccttatctttgatgatccttgtgacagacctgtgaggaacggagaagtagttggtctcatctgtgagcaaagtgtgttgtaacggaccctgtgtggaggataataacaatttcaacatctattgagagcgtggcatgtgctagacacggttcttaatgcattacacgtataatttaattaccgcaacaatcccccaattaagatcccagaattgcacaaagaagtgatttgcttaaaaactgcttcttgatcagtatattctattgttagcaccttgtccctaagagaccttatattatccttactttgcagaaggaagaaaccattgagtaattcttttcccacccattgatctgccaaaaaaaactcatcttggccttggatgtagtttttaatgggaacaagaacaccagccttagggtcttggatctcggcaagcttttcagataccaaagtgtctttcttaggaattgcctggctaagtcatatgattataagaatttctttccatcatttcttatattccacaaaatattggtggattgtggtttctctaataggattatgaccctcagagattcttcctccacatatttccttcctccgtaagtttccattctttccttctacccacttccttccccttggcatgtgtctggtattgagcccttggcatctgtctctctttcatcattgatagctagcatgaatgggtggctgtttcacagggcctgcattgttggctcccacagcagcagttagaacattctctgtggcctgggttctgaggtccacccaggcagtgtgagccaggctggcccccagttctgagctgtggtgtttcctttcattgttggtgccttagctcccagttgttaaatatgaagctggaagttgatacaaagcagtagaagcctgtgctccttttaccaaagtcatcttgcattcaaatatagtcagagggacattgtaccttgggccaggatctgtaggaagtcggctattagaatgtggtcccagagatggcaaattttacagcctgattaactctccccatcagcttctcctaggaagtactattgacctgaaccacattaaatggtcatgtgtcatcctcactgtagccccaccatgcaacatcactgggtagctttgttctggctgccagttgttatatgtaatattcgtagccatgagtcgtggcttcctggggccttggttaagctatatgaaactcttatgtaatcagcattccttcttccctagagaaaggattcaagtttttcagggtttgttcattgctcaggacctgacctttaagttgagttgaggtgtgaaagtcccaaagtggtcaagtttgaaagtcccaaagtggtcaagtgtagaggaggggcccaacacagtggctcacgcctataatccagcactttgggaggccaaggcaggcagatcacttgaggcgaggagtttgagaccagcctggccaacatggcaaaaccccgtctctactaaaaatacaataaaattagctgggcgtggtggcacacacctgtactcccagccactcaggaggctgagatgggagaatcgcttgaacccaggaggcagaggttgcagtgagccaagagtgtgcaactgcattccagcctgggcaacagagcaagacttggtctcaaaaaaaaaataaagaagtgtagaggagagagatgccaaagttggtgcttctgtgctcctgtggataagtaatcagagccataaagtggagctaattggctgcccctggccacttctctagactcgtgaaaagctgaacagactgtggagactgaactgctcttctggagctgggaggggagagggggcgatgggagaactgtatccctgctcagacctcagcgagttgggctcactgtgagagctggttgttgagacatttcttaaaggctgttttgaaaaaaccactgttgcaggagagtagcgtcatgcttgggcattggagactgtgttttagtacattgtgtttataaagcactgctcattttgcacccctcctcacctggctaccctctccagttgcagaactgaacctcaagaaggggctttgggccttcaggcatgctgatgagggagagtgggtgctgtgtagacagcaacaggagaggtacccaggcaggcatctcacatccctaagggggagaagtgtgccatcatgacatggtggagacctggattctcatcactatcatgacattaaagggatttttaagtatcatgcagcccagcccagtcactttagacgctgaggcccaataagatgaaatcactgccaaggccacacagctagagaacagctcagccaggaccagagccagatcttcaggcttctaggttgaagtcttctcctgcaccacctggggtaaccactaagactcctcatctgtaaacatagttgacccttttggttctaagattctctgagctcatgaatagttcttgagagttttgagcaaactagggaattgtttggtataggtgcaatagatcccacttatagagaaggttaagttgaatattatggaatgtgagctagtgctggacatagtgttatttactctgatgatgtgggttaaaatctttaatggggctgagttcatgcaaggaaagcccctgggtgtgccagtgtagtgctgatgttagattctgatttggccaattatttatgctacttcagggcgaggtatttgagtgtacagtagtagctggcctcatgagctagtagtgtcagatttctaggatgttagggaagtctcgagagaactgcaaatgtctcctggcattgacaaattagaccattttgttttcagtggatcaactaaggttaaacttaaacaaatatgagcagctgggagattttggaagaagcaagatgtgcacattctcaaaaaaaaaaaaaaaaaagagagagagaaagaaaagtctgtgctccctgaggaaggaaggatgaggcgtggaactcggaatggccccctccgaggaaggaagcagttatttctctgccgttttgtttctgttaaggaattccagaagttgcaggttgtggatcatgacctcttttttttttttttttttttttctgttgctgcttgccagaggaagggagggcgggtggcctttaaataacactttggcctttatggaaatgtatcagatgttccaggagtgggtctccctgctcgcgcttgctcactggtgctcttacttttgcttcatgttcactcactctgtcctgacttgtgtcctttctctaggttatacttaacactcttctcgccttatatagcaaggtctggtcgttaatgttaacagaaatctaacaacagggaaggctgccagatagcattaatcaggccagtgtttggaatttcataaatgctctgactttgggtacaaattgaacattaagaacaatatgaaaactgtcttccttcctctctcttcttctctcctctccccctccccagcctatccagtttctctctctgtttctctgtgaattcctctgctttgccatatgcttgctgcattggaactttgttgatttttgccacgtttaattttttatttctctgtctctccgtccactccaagaccacaggcggagcagcagcagccggagccaggactctgcggaggggcaggacgggcaggtcccagagcagttctcaggcctcctccacggctcctccccggtgtgcgaggtggggcaggaccctttccagctgctctgtaccgctggccagagccatccagacgggtccccccagcagggcgcctgccacaaggccagcatgcagctggaggagacgggtgtgcatgctcctggagcctcccagcccagtgccctggaccagagcaagagagtgggctacctcacaggcctgcccaccaccaacagccgctcgcaccctgaaactttgactcacacagcatctccgcaccctggtggtgctgaggaaggagaccggagtggggccaggagccgagcgcctcccactagcaaacccaaagctgaactcaaactcagccgcagcttgtccaagtctgactctgatctcctgacctgctcacccacagaggacgctaccatggggagtcggagtgagtccttatccaactgcagcattgggaagaaaaggctagagaagtcaccctccttcgcctcggagtgggatgaggtaaggccgacatgacgtcacagggagctgggctggccaggctggccgcagcccaccacagctcccgtgagtgccaactctcaggcccaggatctgggcaaggttgctctggttccttcactccgtaactaatgtatttctgacaatcgtaagaagaggcgagcctcaggtagtctggatcacagaggacaggtccttaatggttaaattagagggtggaggccccagcagagcagggctgagggaggggcactttctagaaatgacatgctgtttggaaatatttggatcccatcagccccattgagagaatcatgctcaccctggagatgcttaagagctggagtacttcctatgagtccttcaggagaaaaagagaagatccagggttagttgagaggtgtgaggggtgtttaggggaggacagggtaagtctggggggaaagctgctgaaagggggcttttcttttttatatatataatttcaacttttatggtagattcagggggtacatgtgcaggtttgttacatgggtatattgcatgatgctgaggtttggggtacgattgatctcatcacccaggtagtagacatagtacccaatagttagtttttcagcccttgcccccactccctcccctctccagtagtccccagtgtctattgttgtatctttatgtccatgagtacccaatgtttaagggagaacatgctgcactgtttggttttctgttcctgtgttaattcactcaggataatggcctccagctgcatccatgttgcctgaaaaggacacgagctcattcttttttatagctgcaagaggaaggcttttctattccctgcttctccatggttattcttactgtgctgtcctggaaggccaaatacttcttccagcagaagggtcctgcccatcccacattcccagattggtcaggcagaagagggataagtggttcaggaaatgaagattggggagtagaaaacattgggagtcagaggcccagttttctttcatagccattattagttggaaatatgtaccaatttctctgtgacctatggcatgtctcgctgagcagaagaatgtgtttctcaaagataggtaaacaccatgggaatgttaaagtaccacccttgcaagcttcttactgagtggaagctgcctttgaagtggactgggtctgtctctgaggaataatttcaagaactccatttagctctccaagaggaggggaacactacagctgacatgtccatttgaacaatctgtacacttaatgccctacccaactctatttgggtaggtgctggaaagttatgtaaaccaaagccaatccatttccagtgaaggaactgggttgggggtgggggctgtgcttccagcgctacctccagataaggtataagatgaagcttaagattctgattaggcagagacagaggaatcctgtgcaaaagattttcattgcttagtaaacaaagatttggtgagcctgtgctagatgcctggccacttgtggaaagtcactatgagtgagatagctctgggggaggggggtgccaggagattacacactggagtgtgtatatttgtaggaatgtatgctctacctttgttttttaaaacagagttttactaatttacagtcagctataggaaaacttcaagataaatttaagaggaaggtgaagataagtgcagtgtgctctgaaatggccatagaggtcaagagagaaaaacatcagtgactcttacccaggtctgagatttttaaaaaatcagtgggtgggggagtggagacaggaggtgtgagagggtgggaagagattcaggaaagaccactagagcaatgggatttgacatggaattaaaagactgagtcttatggttaaaaccagattgaagctggtgggacgaggagaggtgggtggagagagcggcatgagcagaggcatggagccagaaaagttcaggtcatttggtttttctagggtgctgactgtgtgtaagggcagaatgagaaataagagtagaaagcgagatttgcaccaggtagtgagagggcctcgagcatcaggccaagagatgagtacagccagccctccatatccatggttttctgcatctgtggatttagccaactgtggatagaaatatttgggggaaaaaataacaaaacaacaataaaaaataatgtaaataaaaatacagtgtaacaattacttacatatagcatttacattgtatcaggtattataagtaaactagagatgatttagaatatacaagatgtgtgtaggttatatgcaatgttatttcatgtcagggacttgaacatccacaggttttgatatccaaatggtgttctggaaccaatccctagtggatactgagggatgactcctggatatgctatcaaggcagtatctcagaatcctttaaacgggctggaagacagctttaccagtctaatgaatcacctcttctttatggctccttctgagcgtatcccaaaccagagaggtcagcagtgctgggcgattcttcacaggatatttatgtcctgttaacatgcagcatttctgggcagccttatgggctccactgtttcctcctggccaagaaatacaaaatcacctgggcaaagctgggcttaattgaggttggctgtgtgggctcgtaagccagtgtctctttgcatcgagaggagtttcatttgctgatatcacctgtgcagataaaggttgcaggtgcttacaatggcccagggatctacatctatccaagatctaggtgctgtgggccagttctctagtgtgactgaaatgcaaaagccctgctacattttaaatttgaaaaaacttaaaggcaattgaggtcttattggaaagaattcagaagatcaaggtttgcttacgtcctaaacattaacagggccctttatgtgtaacccttcaatgttgtttcttagtgatactgtacttggtttctgtggatatcactctgtaaagagaaactccaaaagtgtttcccccagtgattggccctaaacccagggccttggcaggctttcctggaatagggcattagttaatggctgctccccaccctatccctgaccagtgcctgtagccggctttgccatatcctgttcttgctgatttttttctttgttgtccttggacccccgggaggtggggaactctgctctgaaggctctgaaggtgcttgggcctagctcacctcttcactgtgagacctggggagggagaaggaaggctgtcgggtgggagcccctcaggctgctcctggaaagaagtgcaggaccacagatgggctcaggttcaggagtcagcagatccagcttcaagccccagctcctccatctccacctcggtgcatggactacctcagtaagctcactgttattattcttatttgtgaaactgaggcagttagatctgtgtttcagagtgttttaccaattagagatgtgtttaactgcctagcacagttcctagcatgcataaagtgttgactaaatggtagatattaatgttactatcttgcttggagctgcagagaatgggaactgaggactggagtgtgttcagaccttatgaaatgcagagctcaggccgggtgcggtggctcacacctgtaatcccagcactttgggaggccaaggcaggtggattacctgaggtcaggagttcgagaccagcctggccaacatggtgaaaccccctctctactaaaaatacaaaaactagccgggtatggtagaatgtgtcagtagtcccacccactcagcaggctgaggcaagagaattgcttgaacccaggaggcggaggttgcagtgagcggagatcacaccactgcacctcagcctgagcgacacagtgagactctgtctaaaaaaaaaaaaaaacaaaacagagctctttgcaggaggttctttgttgtttggtggtagcagagtcacggggaacccctggagttcaaacccttcaactggtgatcctcctgcacagctctgcctcactgcagggatgggagagcccacccagcctgagaaagtcaggcaggcaccttccccactgttctcatttgagaaattaatgagctttctgttgaactccctgagaggagaagagaggttggagagaaatctacagccttctctacaatttgtttttcaaatatattcttccacataatggccagcaaatggctggttggttgagatgatgttctccagttggggaacatgtatggctaatagatttgggagtcattttctccaaatacagactgctccttattgtgggttaatgcagccctgttgaactaccctgagcaacatgacttctgaaagatggcctggttaaggtaaacctctgtgatcatatctgttaatgacactagcattctccctattttctattgtatttttggtgacaaagaagtcatagagtttgcctttaaaagagctcagcctaagaggagatctgaatccaaacttcagtagttattttctgtgttctccagtcaagtcaaagcactctttgttgtcttaatgatgcttgggacataatagagggcaaactgagaaggtgtacgtaaataaaattttaaaaatatacagataaggagtgggaaattcacccacatccctccatgcatacttaacctctgttaacattcaatacatatccaaattcggagtcttagtgtatttactgattataatttgcttttcttacctaataactgcacgttgtggatatcttaccatggcagcatcaataagacctggattcagatcgtcattctaaaaaggctgagtattctcttgtatggctatatcataaggttggttagtttgttgttgttgaaacttctccaaccattagatactgcacagggcattttccacctgcccttcaggtccagttcctacccttttctatctgcttatgtgtcgtgcattaataggccaaggggttgttggattggttttgtccctctactgaaagccaccactcctgggagggaccttctcccaatagctgttctctctgggttctagtaaacagtccttccctttgacccttctgacctaaggctcctcactgtgactagctcccctccctgcaccttacccaaacctgtgtaaataatcccattactaagttccttcaggtgcacaatttgtgccgtcttttcctgcagggaccctgagtgatacagcagtttttggcactgtttctatcaactctgagcaagcatagatggctgtatgctggagcagtaaacatgactctagcatgtaaattgtaaattaatcttcatttgcaaatgaactgaaaggcttagatattcagggtgctgggaagcaggagaaattcatcatttaactggaagcaccagagctgtggcagtagagtcatggcgggaccagcatttagaaagtttctttcactctttgactgaatattggttgaaaggagtgcagctgaaactgtaaccaaaggaggcattatgcctccaggaaaatctcagggagaagtatcacaagcagcagtggtagctgttggatcaggctctaaaggaaagggtagagagattcgaccaattagcgtggaagttggagacaaatttcttctcccagaatatagaggcaccaaagtagttctaggtgacaggattatttcttatttagagatggtgacattcttggaaagaatgcagacagaaataaatcactattgaaatggcatcacgtgaagctgctccttccactgaagtcctaaaatatttcataatataatttccatgtctttctttataataaactaaatttctaaattttattttaaactttctttataataaactaatgatatataaagtaatggcatccagtgtctctaaaactttgtttttctgcactgatatagacatctccaaataaaaatatgtaaatttaacaaaattaaaaatccaaaactttaagcctttcccacttcctactataagaaagaaacctgttctcccttcatcaagctggcagtgtcctcagcatctcagctgtgtgttcctgcggcagagtctccttttggtatgtctttatcctctgtctcttgcacagtgtgatgtacccacagcacacacacacagcaccaattaacatctgagataaataccttgtaggaataacaaaaatggctttctggtcatattgtggtttgaatggataaaaagtttgtgatgaccagattagcctctcacctgcctttgaatgggattaaagtttatgaaagagaaaaccacagaaggctgtttgtctacttagcataaacattggagtcatttaaaacttggctaaaggcttaaatgataaatttgtgttttgtaatcagctttcataaatattaaataagtgggagatgggtgaagagcagggacatgctttgtatgcattttgtataagatgagaataatttctggcacaggattttgggaatgtcctggctttgtctgaaatggtagctgaggaaacccttggctcttgaatccttttcctgagaagtgaagtggcagcaactgggagggcaccctttcaggccaagtccagaagtggcctcgccacctcgccctttccagctctttctcattagaggcatgatgtcatcaagagacaagctgattggttcaactccatagaggctttggctgcttttaacccttgggggttaggtgtgcaaaaagaagaatgtaaaataaggagatttgcatttccactgatgatgactaaatttcccacgccatattctgcaatgtgcattgttcctctttatgtaaacaagcatgctgtgtagtcttttgtgctgagcaaagccctcccgccctgaacaagaatgtgacactcctacctctggggaaagattaggacctggagtgtctatttaagttgtttccaagtatacagagtagtcacaactgttatcctagatgaaacaccctttatatttccattggctttaggtggtctggtaatattgaggtaatttgttcatatttttaaaataatctcatttattttataggcagccctaaataaacagttttggcctttctatcaaagtgatttttgttagcctagattatatatgtgtatacacacacacacacacacacgcatatatgtatgcgatgtgtgtgtgtgtgtgtatttatgtatgtttatatgcatttccatggccttgatgctaacaggagaaactccacggtgttgtgaatgagcgggagttagtcctggctctgcaattgactggtgatgagaaaactggtgtgttcagcacctctctctcccgcttgctggtcccttgctgccatcacgtctctaactggacaggtgctggaaagcggggttgggggagtgggggaatgcaccctccctgctgctgccacttcacttcccaccgatgcatttccccattgctgctgtccctatctgttactcatctgtttccctctttctttttgcctttgctctttctccccttttcttctatgcttttttgtctttttttcttcctccctacttttctcattcatttttccttttcattcttatttttacaggtggagttaaggataggcttctcttctagcctctcagccctctgtaccagagggattttgcttttattttttctttttaacattttttccagggttgacccacatttctattctgcaccagcatttctgccactcgtggtatccgcaggccaccacacccaccgccagccccagtcccccactaaacagcctggttccctttagctgcagcaagagggcaccatcaagcaccagggagggagctggggtatttgcaaaatcaccagcaaaaggagaattttccttttctcccttttttgttatgttacaaactgaaagcttgggtgacaatgaatgtaggtgactatagatgagaggaatttgacctttattccagtccatacaaatgctgagaatcagagaaggaaacattttctgggatattctttttatactttggttctggttttgtatcttgtttttctagtaaagtatcagtaggatacagagtgcgtgattttgtatgactttgggaataatagttcattttatattattctaagcaattgtgtctaagaacaagtagaggtattttacataatcagtaatagtataaaattgaagtatatttgtattacagttacacgttcagctaatttgttgagcacctgctctgttccaggtaggctgtaagtgctggggatacagcaatgaacaaaacagacaaatcctcttgccctcatggagctggctttctagaaagctagaggggaatgagaatttaaaaagaatgaataggtaaaaatcgtagtatgtagttgatgatgggagtggttatgagaacaatacagccaagaacaggattagagggtgcggtgggaggattgctgccgttaggtgagtcagccaaggaaggcccctttgaggaggacgtgaaggagcaagctgtgcatgcttggggtggggagggagaagcatgagtggttattgggctactttctcttaattaatttctcctgtaagagaaatttaaaatcctaccctacacttaatattgtcttacaaatataccttataacttgacttttacttttaacttcctttttctttagtcatgattgctacctgttgcctttctcatcttggtttttttccttgatttctttattttaagctgttgggtgcatgcttttaaacatgcacatacccacatttttaaaaagctattgaactagaatgaaatcataatttctcaaacttgatcattgttcttgttgtcatcctaggcaaggatgttgggtgagttctggcagaggggctgggttataggtcattgtcttaggaaatgcctttccataagctcattgcatactcaaggcagaaataaaatctgaaaaccaggatcacgaagcaaagggaagagaattcaaaattactaagaccagaagatggccagaaatctcagaaatgggagatccagtgagggaggccaactgattgggtgttcatggaggcagggaaggtgagttgagggtatgccaccaccacttggaacacagaaatggtgctgatgtcctaaaagagcactcaccacaaataatttgccctgatgaatcttaaatacatcctctcaggagccaggcccataggtaattacaaccagtaagagagggagatgctggtggcctcagacattctctgatcctgggtggacttaggggacatcagggtagagggagcttcttagagaccagatatgaaggtggtctgtgtgtatgcatgcacgcatgtgtgtgtatatatcccagagaagtttaatttgtttagagatatgctgtgtggtcagagtggcagccagatggtgggggataggctttttattatgtaagactctgagaaaacaattaatctggacctcatttgcacttcctttgaaatgtgtgaccctcagaaacaacacagggtcttttcctgaccccagtgttatgccagcatcctcaaagatgtgctctctgatctcagctctgtgagatgagatcagatcatggacgactaccctccctgcctagggctcctttatcctgctttcttctccatagatgttcccttttgatgctaccaggtgagtagccagtgggtaagaagaatgtctgtggcctgtagctgctgggcagggccaagatgctgagcgaatctttcccaggtatcctactcttgctcacaagctctaatgacccagtctctggcgccacagggcccacctgtccataactcaaggcagcctgttttatttgcctggacaggtggaaaactgcctaagctcactaggtgcctacaaatgacaatttatctggcagtctgttcttggctgtcctgatttaaacaggcaagaagccattgtaaactcagctgaaatgttgtggtttgtgtaaatgttctggttcctttcctttccactttggatctagttattttcaacagaacttcccccaaaagcatggaagagccttatatccattatgcagtgggcatacagtcctggttttgcagcttgggccctctgtactgggccaaaggacagtgaagagtgccgtggaacttgggtgcagtggcagaggactggcatcccatcttcacactgtacttcaagggtggagatctcccagcctcaaggtcataggctgtttctgtgtccttggagggaatatatagcttaacctccatatctaactgtatgtagaaatctaggcaaagctaaccctagaaatggaatgtttataccttagggattttgtatttttaaaattataatacctgaatctaggtgaaattttaaaggtaccaaagactatatagtgaaaaataagtcttccagattttcagttcttctccctggtgttttgaatatccttccagaaatattctctgcatgtagaagcatttctgacatgttaagcatttttctttttaaaagacaaaatggtgctgtctcatgtgtactgctctgaaccttgcttttttcatgtaatagtaattttttgaaaatcattctaattgagtacatgaagttttcttttttattgttcataatattccatggtgtgcatatactatcatttatttttgtttcttgtaggtggacattctacatgttaccaagcttttactgattaaagcattgctgcaatgcaaatccttgtacagagtcattgtaagatgtttctagaaactgaacagctgtgtgaaagagtttgtgcgtgttaaatttactttcctacccacaacatgtaaacaccttatcaacatgagggtggtcagccttttagtctctttttggttaacagattggtaatgttatcttatcttgggttagttttaaagtgtgtttcttattatgagtgacattggcatctctttatatgtttacaaaacactactttctatattccttttctcttttttttttaaacgttgttattgaattgatctctttgttactaatttgtagaagctctttgtatttgagaaaaattagccctttatctatgatatgatttgtcttttggccttgtggtatttttatgttttttttaacatgtggaaatttagaatttttatgtagttgaatctatcaatcttgaatgacttctgctttttttttttttttttttgagacagtcttgctctgtcaccccggctggagtgcagtggcacaaacttggttcactgcaacctccatctcctgggttcaagctgttctcctgcctcagcctcctgagtagctgggattacaggcacctgccaccacgcccagctaatctttgtatttttagtagagacgaggtttcaccatattaggccaggctggtctggaactcctgacctcaggtgatccacccacctgggcctcccaaattgctgggattacaggcgtgagccacggcgcccagtcgacttctgcattttgtatcccagttaagaagactttccttactctaagattacaaatatatgtatattatttgtatatatacattatatatattattacatatacatatataattacatatataatatatacttatatgtaatatacaaatatatattatttgattacaaatctattttttatatatatatagttacatattctatatatatacacacacacaaacacataatttcctcctgatattttatggtttcatttttcaggtataaatctttgtttcttcggaattcattttgctatgaggagtgctagacatcctgttgatttttagcaacaatttgatctagcccactatttgattcacttttcctggtgatgaaactaaagctttgagagctgaaatgacttgcctacggtcttagggttgataaatgtgggaaaccagttggaactacatcttctaaggattgtatttagaatataggtgagctaaacctttatttcagcattaattagcagttacttttcatttcctcttgtttcaacccaaattattgcagctttatcttactttttccctctaactgcagacaaaaatattggtctttgtgtatgaaggaaagcaacttacgaaaggagtctcctgggagaagcatgtgtttccttttttaccgtaatattaagactcaaagcatttcttccctttactgctctctaagatggggggctgttaggtttttcttttgtgacttgaaaagtgaggtgatgatttctggcaaattctaaaatttggaatttggaaggaatcctagttaccatgtagtccagctcccttatgaacaaagtcacttctgtgttgtctaaaagtgaccttctttactaccgtacttgactggtttaaaaataataatagtaactaactaaataaataaaaatgatcttccaacttttgcttgtaaaccacaagtaaccccctctaccatccaccgttacgtctatgaaataatgaaaaatcctttctcatatccagctaaaatctgtgacttccaccccatcaattctggttttaccttcttggtaggtcatgcatgcagtcctccataatagttgttcagatatttgaagctgcaattatgtcctcccaccctcaaaccttctcgtttccttgccaggcaggcacgccagtttcttctctctcacctcagatggcttattttcaaactgcttttgtcccggcccttcggtgaacatcctcttgaaatcgtatgacattgttacagatgcttgtacataatgtacattgcatggtacactatgatgagatttacatgttgcaggccacctgataatgcttcatcaaggggtttgatgcgcatcttagtctcctgaaaacttaagggttcaatctgtccgtgagcccaagtcaaagacagtgtgcacaatgcttccagaggtaccacacctccatcaggaggccatacagaaagcggttctgtggagtggaggtgtttgttgccttttaaagctttatcctgtgatttctgccctggagatacagctcagcctcttccctgttgtgctcttttggcaaaatcaatgtagcttttccccatgtcccatcacataacagtgactctacctactctccacctaacagcgtaatcgcctgctctgggcccatgagacttgctcaagcattttttagcagctacatgactcactatgaccttaatttgcaggtaaagatgcttttgtaccaatttttcatttgaaatcaataggacagataaggcctgagaaagcctatgttgtctaaatgaccctgagccaggccttgtaaagggtcactcaagtccccttgtgctcttgaccagaacccttcctcctcctccccattttgtgccagtcgccagggtttccttccaaaatctctctcctccattcagactcacgtatctgggatcctcagcggccaccacctcagtatctccctgcttgcctttgggcttctctagctcatcttacttgtggctgccttaccatgttcctcaaatattttgtgttatcctcccttgactaaaaacatccttgcttccctattgctatggttcagagtccagactccttagcctggagtgcatgattcaccagagaatgagcccatggcccagcctctataactggccttctctttcatctcataccctatttttccagctcagttaattcctatactcactgttttcccctacacgttggtttatactattctccctacttgggtggctttctccatttctttttgttgaaattccactgttcattagaggcttagtcactcattcaccacactgatggagagcctactgtgtgcttaggctgggcatacagaaatgaaattgtaaacaaacatgcagcttttgagggacttagaccctaaagggagagatagatattaagcaagtacaaataaaaatattaccacaaatgaaaataagtgctcttgaagaaaaggagcagagtgctgggcaaggtgtgggaggtgaggtgaggccccattagatggactggccatgaggcctctctgcagtcaggcttagggaggctgaaggagctcagtagcccagtaaacagtgttggggctcaggagaggatgaggtcaagtctctgtctgccataaaacctgcccccttgcactttgagcttgacaggtctttccatcagcagctctttccgcaggcactacatgctttgctgctcttgtttgtgtgtgtggcccttctccccagtcagatgagagacctttccagagtagtaatcacagttcatttttacaagccctgcggctccccagccccaaacgggtgcatagaaaaaatgcaagtccttgattaagggcctcagaaagatgtgggatgtcctgagtccttaaaatgtcatgttttcccccaaagaactcaaggtgtggattgctaaagacttgctgcgcttgggcatagataggtatctgtttttcttcttcttgagggagatataataattaagcccttctccttcacctcacccttaaatttggaattttcttttctttttctttctctaataataaggtagagcccttttttatgccacaactgagagattctaaagcatattcagaataatttgcttcatagatgtgagcacagaaatttacagattttgggagatgtatactgaatgtcttatgactttctcacttaataaattaatcctccctcacccattttttaaaggtaaaaatatttcactaaaacaagctggttcggaaagggggagatgaatttggcatttaaatgtcaaatatgttttaagctaacttcattcactgcccgttcctgcctccatatatagttaacatttataaagaatgcaaatagaatcccccttgataatgtcacattggtgttaacagtctttctgcttctaagtatcatatacgtaagtcaagaacagaaatagtttggacagttcttggcccctattattccaaattagattgaaagaagaaaagaaccaaaccagatatggtatatttctgttaaaatatcagctcctgctcaggtagctccatatgttcccacaggtctccagaaggacttgctgcagcagagcaaagcagaactaagcaaatcctcagctgggttcatgtgcttacagccattacgggctttacaggcacttaatagagcagagagttcacatctcagacatgtatgatgctggtggaattcatttggttaaagaaaaatttttccaaggcccattttttaagaatcaaaaatattactgctgatccccaaataaggtctttgatgagtctctcctgttggggtattaacctaggggtctggccatgctccagttcagataacgctgtttctctgtactaaattcttcctgaaggttcaattagattttggccttctttcatcttgggcaacaactcaagaactgcccatttctaaggcaggagcttagtgatggatgcatttgtttcaccgctgacaaagattccaatgtaaaatctgccaggcccttgaggatggaaacagagattgatctcaatgaagaacgagtctattggtcctcatgcagagatgcattaacgtctctctgtgctctggaaggggttcacttccccaggtggacctgagcaggctggatgttgcagcctgttcagcggcaggatcgggccctgttcctggaagagagctccactaaggtacttgttagaagtcatcagtggtgttaacactcaggttcctttggtcggtggttccacaaagcaacatttactcagcacctactattgccaggctttcaactgctctatgtggcattatgagaacataatgttgcaggtttaggtttgctgtgccctttttaccaggggtgtgtctgtgtgtctgctgatgaatttcttagaggtatattagtttgctaccttggtaccttttgccacttagttttgctttctccttttcaaggaacagcatatgtgtgtttgtttcattgtagtgatccactgcaaattgtgtataagcttttgtgggtggttttctattttgacatcaccgtaagtgttttggttctttttcttgaatgtttgttctctgtctggagtcaaacccgagacagacttggaaagtgaatagtgtgggatcagctatcccacagtcactagccccagccttgtttttcagggacaccctaagtggcattggggaaggcaagtggacctgcagggcactcattgacgttagtcagagcatctgaaacaagaaattacaagattcctgggtctagacctggcttgtgggaagttctgtctgcatctggggagcaccatgtacccttgtcaaatttgtggctgtgccttttagtttagtttagacagtgcctctcacttacattaattaaaagatatttttaagcctttgtagtcttggtattactcaggccggtatcattgcatcatttgctaaattttatgtaataaggtaattgtgtctacatttcttcactgttgtgctagaaaaggaaataaaacatcataaatctgaagtgagcttggtcagaggcagtcagatctacaaaagtgaggccgaagagaggaagcctgagccgagtgatgattgatccctgtgacatcacagaaggacaaatgggctaaggacagacttgatcacgaatcctggcatcctgagccaaaacccagatgcaaaaacttaaaggggatattttacaaaaagtgagggaaacagctcacttgacactggtggcgatagcctgtgggactcattacccgcgagtaagtggcaaatgttggcttgggaacggcctcgccctgagtaacaggaagaaaggcgttggctggcctccctggagccctcttctcagctgcactgccagtggctgagcaggctggccggaccgtgcactttactttatcagcaggtatttactaggtgccaattatgtgtcaagcttggtgctaggtgctgggtgcagggggtagagttaaaggacacaattccttctcttaggaagtttccttgaaggaagttgagtggctcctgaattctatctaaagagggcttaagagcagccatctggttgaagtaggggctgggggctcatctgaatggtgtgcttcactgtttggctttgttttacctgttttatgtcttagatcaacaaaaagaattttctaaaatacacttctatttatatcttaaataagaataagaaaacattagttgtttatatgtaaaagcattttatttttattggtgttggcttggcaggaggctattgagcttataggtgggtaaatgtgccccaccccctgggtacccctcttgacatggccattgctggcctctgtttccaccctcatgtcacattgacacatgggtcttagggtagatgtttgttttgagttctacctcaaggctggctgcaaactgctcagaggttgccaacctgggcgagtcgggaatcagcctcacttctcagttccacagttgatttactagtcatccctggatatcagtttgtctttctgttaaacagaataaaacaagagcgtttcctgccggtttcctgtggagtgtggcaggccagtgcttgttggcttcattcagaaaccaggccttttggaaatacagagccatgtcctcagtgactgcccttcacaggtggctgccccacctctctccgcttgcctcctgctttacattcagagcaggaaagctgttagcacaaggttcatttaaaaccccagttgaggaggttatcatagcatccttaattctagtgaatggctctagttttcccttcagcagttggagtgattaaatgtcataatatatcaggggagtaccaattatgaacatggatttcatgctgggtgcttttacattctttgattggtgttgggcatagtactaacttaccttggcagcacctttaattgtggcattcatgaattgaattggactctgagcagctggaagggtctggggctgaggactgctgccagggcttcacctgccctgtcacagttggcctgatggggcatctaggatcttactcacgtttgacttcatgctgcccaggcaactaggcagaatatttttgctttgagctgagatgctgcgttggttttcattgtaaaacatcagagtcagaaggttccctaagtgtgagttctctcattacaggttaggaaactgagcccattaaggatgtgacctactcagagtctcacgagacctttgacagcgcccaaacctctgctgcatagcaacatctttggcgcagactgggtacttgatacccacttgttgaataaatgagcaaacccaggtctctcgagatttgtttaacagttatgttaacttttttttggtttaaactgtcaacataccaaatctggttttggttcagtgactgatctaaaatattagaagattctgccagttttctagaaacagtacacagactggtcagccttcatgttgctaatgctaagtggaaagtttaaccctgtagttccttctttctctcatatgtggtgccttacagcagtggttctcaaagggcaattgcagaccagcagcatcacccgtccctaggaactttctagaaatgcaaattcttccctcctcccccagaccttctgaattagaaactctggggctgggccccggtaatgtttctacaggctcctcaggtggttctcaggcacgctgaggtttgagaaccaaggctgaagagccacgtcctaacagtgttccctctattcgtgaacagactatgcatgtgagcacacagttatgaacacgcaagaaccaggcatgggattacataacactagcaatcaaataaaatgtaatgcaagttttatctgacatatttaatatatacatggtagttctcgtgccattggtaattaggcaaatgaaaagcaggtcatataaatggctataatgaatattacctaggcaaatcaagtttttatagtttttccctattagctttttagtatctgctagcagccattactgttgatgacttccctaattacacagatgtacattcttcagacactcacagagatacactcacttacatttgaaattctggctcaaatttcccaattgttaggattccctgtgaccacctatctctggctgagttttaaaatctcaaaagcaggatttaaatgcaaatagcttatttgggaggtgatcccaggaagcactggtaggggagtgggggagtgagaaagaaaggaaaccaataaaggatttgttacccagcaggttaccccttgggccgtggcctgctggggaactctgggagactcaaatttactttagatcaagggagctggggtatttatgtaccacttccagtcagtctgggtgagggctactcacctagtgggagtaggggcaggacgttaattccctcttgctttcagtctacccagtgtacaggtctagagggctctggcagcctaagagaatcctcagtcacaggtgcttgcagttggaaactggcagatgggagggtttagaaatgacaaatgcctactgtctgctttaccacccattagtggcacaggaagggttttccctggggtcctggttctggagggaacatgggcaggcaactcaggggctgagagcagctgccaaggatggtggtaagagaagggagagggtactgtgaaaatagactctgggtctcagagtctgggccagggagagggcacgatggagtgaatgaaaaatcctggggcacatagatggctggcgtcaggtctctttgtctcttggggaggggaaaaggaaagcagagggttctgggcactggtaagagtagtagaagacagaagagaaacttaaatttcttgccagcctgtgcctttcctctaactccaacccgcacccccatcttgtcctactgttgttttccattttctctaggctaagagaactgtcagaagcccatcagtctgggaagaaagggagcttcatgcctggcctccttgtgggtgggtccgctggcacattgtttgcatgccacagtggtgaagatggggaaactggaactttgcattcttactgagatagtcctcaatacagtttcgaccggtccacgatgaaaggagaatgaaaggagagagttaagggcagtgaagagtgctgtgatagtgctgatggtatttgattgccaaccacctttattctgattatgttcattctttccctttttttaattttattttttttagagacagggccccactctgttgcccaggctggagtgcaatggtgtgacaatagctcactatagcctcaaactcctgggctgaagtgatccttctgcctcagcctccccagtaggtaggactataggcgtgcgccaccatgcgcggctgtttttgtttttgtttttttgtagagacagggtctcgctgtattgcccaggctggtcttgaactcctggactcaagaggtcttcctgcctcagcctcccaaagcactgggattacaggcatgagccatggcacctggccacttttcctttttctgtgcttcagttgttctttcttttataaaacaaagggatagttttcatgttgattgttaaatgtttgtctttattaaatttattttgaaataattatagattcacaggaagttgtagaaatagtccagagaggtccttttttttagtacccctcacctagtttctgcccatggtaatatattatttaactctaatacaataccaaaaccaggcgattgaccgtggaagaatccacacatccacacaccttattcacatttcaccagttttgcatgtatgtgtgtgtgtgtgtgggggggggttatatgcatttttatcatgtgtaagttcatgtgatcaccaccacaatcaacatgcagaactattctgtcaccacaaagatctccctcatactttttttttttttttttttttttgagatggagtttcgctcttgttgcccaggctggagtgcagtggcatgatctcggctcactgcaacctccgcctcctgggttcaagcgattctcctgtctcagcctcctgagtagctgggttacatgcatgcgccaccacacctggctgattttgtatttttagtagagatgtggtttctccatgttggtcaggctggtcttgaactcccgacctcaggtgatccgcccacctcagcctcccaaagtgctgggattacaggcgtgagccatcacgcccagtccatcctgttaatttttaaagtcatttgccttgataaaaagttgacagctttataacatttctgttcctcccagttaggaaggaaaatggcccacacacttaccaaattaaggggctactgccacgtgcgtccctgttgaagtgggacagcacagtgctctgcacagaagccattctcctgaaagaggcaagtgtgtgtttctgcccagggctgtagagaaggaagggtgagaaaggtcatttttcccaggtctttttccttcagtgctcagccctcgagaggcctaagtcatgtattaggaagctcaggcttctgtaacaaaataccatagattgagtggcttaaacaacagatgtttatttctcatagttctagaggctgggaagtccaagatcatggtgccagccagcatggcccctgacaaggaccctcttcctggcttagaaacggctgccttctcactatattctcacatggcagaatatatgtatctccctcttctatataaaccctaccctcatgaattcctctaaccctaattacctctcaaaggccccatctccagataccttcatagtgggggtgagggcctcagcatatgaaatttgagggaacagaactcaggccatagaaggtatcttcatcaagggctgctccatattctgccacctcctcagttgcaaaatcagtggggtatcttggcagagaggcaacaagaaaggtttaggccctgtattgctagccttgttaccttggttaaactatttagcccctccgagcctgagttttctcacctgcaaaattgagagattcatgtggataatgtctgaggccctgcttgctgaatctgcagctgcctgcctcctgcggccctcgtcttcctttcctccatttccactgacttggtggtgagagcccaagggccaagtttgttgatccctgtaccagcttttctcacttattcccacttctgggggcaaaggaaaaaagaggagtttgagattttgaacttcacagttttgaccagagccatcctgtttattttcagctatgtagaagcatatttgagattctgatgcttgtgcctgcctacacacagacacacatggcctgagcacaaaagtatttgagaaaaacaaggctcttattgatcatttccttcagtctcagactctctctacaccagttcacttattactcaagcatctgattctacaagaggcagaattttcgaagatgagattcctatgccctggctgacagtggagctttgaagcccagcctgggaccctctggcctttagccagggactctttggggtcccagtaagcttccccttcacccctttcttctctcccgtagacctcagggattggcccacctgtccaggtgtctgcctccactgtgtcttccctcttccctcgtatcccagaactctggggaaggaataatgttttccagtgtctccccagttttgctgtgtttgaaataagcacacaatccccttttaagattttattgcatgttaaaacaaaaatgggaaactgagaggtttgcggaaaatagccaataaatagccaacaatggggatgttataaagttatgagaaatactaaaaataacagttgtcctgggtcttggtcaaacgttaataaactagctctttccttggctcctctgactgccttctctctagatattgtcttgaggttgtagcttccactccttttctgaagagccctacctcctagcacatacacaaagcccctagagaacagttgttggcagcaatcaatgcttacaaaacagctgagactggtgggctgtgatcgctctggaatcttcttgcaggctgagattggagatggcctttgaattgtgggcagctcgggggtctcccactgcaaaggtctcacaaagtgtagaggattgcatgaccatcttttctgcctttcctctcccttcatgccacttttcttgatgtctttcctgagaaaatttgtacactccataattgcaacttgcaagactcacttgctaacaaacccaagggtgtaagtccacagggcctttcctggaataggcactcttcactggcctgttttgaaaaggctgtgttcttcctagtaatcccatggggttgtacactttaacctgacacttagcccccagctgttgcatgttgctgcccatataggcaatggattttctcaggagtcctcacactaccagcccaacaagaagccagggcttgttgctctctgcctgccagcaccaccctttcttcagatgctgagctcttctgtggcctcccattttcctgccagccagagggaggtgaccagtctgaacttcggttccagaacctattgggctactttgaggacatcaagttgtgttcctgtccacttggctgagaaaaaaagacagaaacctatatgatttaggaatactgacatagatggtaggttaaagaaaagccagaggataataacatttaattcaggatggtggtggcctcagaggagcagagaaatggggggaagtgatcccaggaagggcattttctatttcttaaaccaggtagtaggcatgtgaatgggtcatttattattgctgttgaaatcacaatactataaaatatgttctttggaatttaagaaacatttcatttttttaaagaggaaagaacacagttccttgttgttgaggtcagcatggggctgatgtaagaggatatcgacacaggaacttagcagtaaggcagtgaggacgcagttggaggaatttcaggtgggaagatgccacacatttgctgggttagccaccatgtctcccccctctcattttctcttcaggaaaagtctcagatccaagaaagatgtatgtcctaaacaaatccctccctaagaatcagttaaggtgtaaccacttttaaaagctctttgtctgtttttccactgggtgttgactgagcccacccagtgcttagtacctggtaggagcactagtgagaaatacaaaagaagctgaagaggcgtgtccatgtgtctaaagaccgggagccatcctcggaccttatgtatgtgtgagcaggtttgcatcagtgtggtacagccaggctgcctctgctgcaagaattctaaagcagaaaccctagatgcaatcagtccacaaagggtgccggcagggcaccagtgctcatcagtgcttgttatgtgccagccaccctccctgtgtcatcgcatcctccccacaccgtcctgcgaagcaggcattagcatccctgtttacaggtgagggttacataggaaactgaaaataattatcttccatgtatctttccttcccatggagtgtttctaatgtatcctccatggttatatttgggggacataaggttgccatttccataattaattgtctgtgatggggttgtgggtggggcagggctcacattggttcctagctcagacattttcttttggatgaccttggatgcccttgagcctcagaatatgtctgcgagacttggaggattccccctgcttttgccttcgtgccttacagtctgtcagggtaggtaggaggactgtgttggggagaagggtcttagttaactgagtgaccctctgtctctgtgtactcagcttgagaactgggtgggctaggggcagtttcttttcaccccttgccacatgcagatgaatagaagctggaaatttgacttgcgtgaggtaacctgagttgacaatgagagcccatgacttgctaatgcctgtgatctgtaacccagagatcatggcctggctagttggccctggacagaggcagtgataaataatgtgtaaggcattgttcaaacaggaaccttgatgaggaagaaagaagggctgaaaatttcgggagtcacctggggtggtttaccagcctgcaggggagagacttctaggaaaacgcagccagagaggggttctgtgtctctgggagttgacttatttgatggtgaaggtggtttgagagtttctgcagtcatagcggctatcttgtttatgaggcactgctgccagttcctccagaggctttccacatgtgccattgttccagtagaagcctcttacatggccacttgggatgagggttgtttagtttggttaattacaaaaccaaaggaggaagtcattttttaaaaagaatcaaacaatttaaccccaatggatagatgtgcacccttttgatgtggatctgggccctttcttccaatgtagatctactaatttggagttctctgccttccttttattacatgaaccacatctataaaacaccattgactaaaatttccagtttgtttcttaaaagtaaagccagaatttgaccacttgtgaagcaatctgagtatagatttcttttggaattttttacaacttacttccctaaccacccttaattcaagagcacattttaaaaaatgatctcattattgagtctcttcgaagtacttacttggttgtcacagaaaggttcttttacactggttccataatttatgtaatgtttaattaaattttctattttcatcaacaaatataaccatcctaagcagttttggaaatgaccccagctgactcttggtaagggtaacactgagtgtgtggaagcagaagaccatgggtgtgcgggagcaagcctgcccagtgtggacatagccgtccgctggcatcacttactgagggacagggtggcatgcagttagctcgctggcagatcacttaagcggaggtcaataacaggtttgccaggtaggtgtcgttatccctgttacagatgaccaagcggaggtgtgggaagaacaagttccttgctcacagccgcgttgctgaaagcggcaaagctgattccacagtctcaggcatttcactacctgcagactctgccctgtgggagccagctctgtctgaggtgagggagtagaggcaggcccacagcctgcatgagaaggagcaggcctgagttgagaccctgttccctctcctcactttggtattgtcttggatcctccggtttgcttcgcgccccaagagctgccttgtagaaaggcgtcactccctcacataaaacgttttgtcctgaatggagaagctgcctccagctgagtgtccaggaagtgagctattgttcacacaacatgttctaaacgttctctgccaaaaggaagccctttccctctggtgtatcttttaaaacaaaacaacaaaaaacaaaggaacctggattttgattaacttgttttttagatagaattttgtttattttggaaccagataaatgtgaatggcaagtacaagccctgtctaatcgctgtaaactgaaatgtgcaagggaggagggtggtgtggactatttgcctggcatctgtggttttacgaggactacagatgtttcccagtgtaagtaaggctggcatctggtcaagttacagagggaaacaggcacagtatctcctgctatggccctgggaaatggcagggactaaaatcccccagcaacagaggtagacaggcattgcctttggaggaggaacagatctcaccatccatgcttacagcagcaataaccttgcattttaggatgatgtcactcagggaatgaatgaattacaccaaaactgtgtcttttaggcaatgcacagcttgctcagacttgtgtcataataaattaactcctcattagagccctgccttgaaagcagggctgcactcagacctcttgtacattgtctcagatctttacagcaggcctctgttgatatgtgcattttgtgtttgaggaaactgaatcttaaggaagagaagtcaggtcatttgtccatagcaatgatcccatgagtgacgactttttttcaccttatagaagaggaagttgaaagtcaacaaagttaaatgacttgtccaaggttccacaactaattaggtggcagaaccagaacttgaactcaagtttttaattcataagtccttgttctttccacccctacacactgcctttccaatgttctcgatccagtacattcgaaatcctatgctgagctttcatagagtgaaagcgaggcttgaaacaagctggacaccatgaattaggtggataaggaattgagcagtgcccacatatggctagtgctgtgatccacggacgttattttgattttctcatgtttgcttttctcttctttaaagtgggaagaatgctagctccccaccagggtgcttgtgaggagggactggatcaccaggagggcagtcagctagtgcctagtgcagtgaggaccccactgaaagaacccagcccaggacctaacaccctgcaagtcttgagttttcacattgttgaacaaaagtgctttcagggtcggtggtcgaccttgctgtgagcacatgaattctgttttcaggaaagatgaatgagccttcaatgtagttcacatagctttcacatactccagaattttgaaggtgtatttgattttctaattttatttgatttcaggagacagaggatacaaacatattctactagctaagtattctaatgtgctgcttatcatgctaaaggaactcacagatgtagggatccatttcttttgaccctgattaatatgagccagtttcccagggtgtactcatcctgggaacactgataattgagttttcagactgtcaagtctggggttagcctgggttccagaatagagaaagccacaccacaacacagaagctgtgctgagagcccttcacccagaaggctttgtgacagggaataatggtgccatcgactttcccacattcctttctctttgtttccttcgcctctcgggcatgtctttgcttattagcatgttgaacagagttcatcacaaatgaaactcagaccagtgttaatcttacaatttattatcctctaaaagatctgatcctgaaagatttttccagtatttcagtatgagacttttcaaactacagaaaacttgaaagacttgagtagtgaatccctgaatatccaccacgtagggcatggattctataattagcattttgctgtacgtgctttattgcatctatccatctgtctacccctcagtgcacttagcaatcatgttattttttgatgcatttcaaagtaagttgcagacatcagtactctcatccccaaacactttaacgtgtatatgattaactagagttcgatgtttgtttatagttatttgggggtaggggggtaaaatttatacaaagtgaaatccattaagtctgttattccatgagttttgataaatacgtacatttgtctaacccaaattcctatcaagatactgaacattactgtcactcccagaaagttccctagtgccttccttagccagccagtcctcacccagcctcttctggtagttttccactctaaattttgcctattctagaacttcatataaatggaatcactgcagcatgtgctcttttgtatgtcttatctgaaaggttttaactagtgctttaaactgaagtctagggactctgtcaacttcatttatacaccttcttcctgtttcgcaagttcagaggtaattaggagtggtaaactgcaggaaatctcaaggcagctgatggatcctgatagtgtatttgtattaagtatgtatgtatgtatttttaaaccttaagtatatataatttggtactcagaatcctacatttgaccaccctgatattataagacaggtgttcccctgtagaatctgaggagctaagacccctttccctggccacactgctaaggaaattgattctgagtagaagtttaggatgttttctttggcctggttttatccacagccagaccagcagtgtgctgtaatgacattcagattgtgaaagaaccagaccgagagacagttacttggaggctggtgggggtgcccgaaggaccaactggcagattaaccagtgtttttaggtaactgcaggctttctgaggtttgtgtacttcctcctcacccctccccaccatgcctgggtgaaaagtagattgtgtacattgaactagaacccaaatacataatcctcattaatcttttagattcttgtcccacttattgaagccagtacttggcttataacccagagttatgtggcaagcagtaataaagttaattggaatctaggtctcccaacttttttattctttcagcagtttcttggcgctttgagtaaaagattacttttacattaggctgttctggtatgagaaggtcatttggcaagtattggttccgtgtatttccttcacgtcatgtcaagtcagggccatgtatttcctcccggtcatgttcatgtcatgtccatgtatttcctttctgtcaagctgcagatgtgggcctaagccctgacctctgagtcagggaaagggccagctggtagttgcggggtgtgaggtgcttttggggagcaagaccaaatatcagcaacccaagaggtataggaaagacaaaaatgagggggcaggtgggaggttagagccttagaccacgctctggaagccagagctccgtggctttcctctctccaccagcctagcctggtgcaaagacaaaaggcaggctttaattggagcctttgtcagggaagacggacaaagcacttttgaaacaaaacagctctgttgtctctcagcctagtaggaaaaggggagttgaaaaagaaggtgacgatgtaaaggggattgaagtagggggacacagcaattaacatggtaacaacccaaatgccccacggtaagacacagctgaagtggagactgagcccgctctgtggaaaagggagttcctcattgttagccgccatgtctggtcgcctcggcaaggacagccctgagcccgctggcagatagttactcattccctgccatgcgcctttcccctcccccatccccttctgcctccctctcctaaaagcagttgacaaggttagaaaatcaggacaaataatttacttcaatccatctttgttttcctgaggccatgcgcaattcagtctgggaggagaaggaaaaaaaatcacccagaccctggccagtgaccctttttcagatgtggaatcaaagcccactctaggctgagaggcgtctgctgctaagaggcagaagacagagatggtgatgaattcttatgtggtttctgggcctgagagtgcagctgtcagcagtctttagggttctctgcacagcctaaggaactgattttgacgtcagcagtcgcctgatgggatcggcacagagcatctggtgaggctgaggaggctgcggctcagtcgctcagcccccggctcctgggaagggggagcactgtccaagcaaggccatcgagccagaggagagggtctgccactttgcccccgtgcagcaggaagcaggttcggctgccagtggcaccagcgaaagtgagagcactgccctctgtgggcagtttgggagtgcctgtggaggagagcttcagtttcctcacctgaaaagtagggtaataagtttgcttggctgtgagtcgaggctctgcaggattgctcagagaagggatcagctgaaagttgtggagtgtgaggtgctttgggggagtgccaaccttgtgccagcaactcagagagtcagaaaaacgtaaaaatgaggagggaaagggagttagagaattcatactggtccagaagggagagtgttggctgccttccccccttcccctgttagtgtaaaagtgaccagtgtattagcgatagctaacaaacatttgtcatcgaacaccaccagtgtgctagctgtgtacaaggcatatggtgggatctaaagaaaacagcgtggcgcagggtccttaccctgaatggttctttagtgtctctgggacacaccataaaacagttaatcagggaagtaatcctgcaaagcagaaggtgtttctgggccaataaggtcatcagtgccgagtggaagaggcgaggtggaaggtgtctcccgccccgtggctcaggcctaaggagactgatgtgtgttttccaactggcagggggtcctagggcaccaacagctcccaggcagcagaaagggtgttaggagggaatgtctgatgtcaggagccaactcagttatagaaacttctctcgtgctcccatttacaccaaaggaaagtaaaaggaaagtgattcctttcccatcctcctctacatggggccccaacgaaagacatattgaccagactgattcctgctctcctgatatttggccccatgtcgtagccctgcacacagccgtgacttgtactgcctcctgaaagggagccaagttacaccaaagcttgaggtccgcctgtgcccaacacacttcctggcacacagaagacccatcaaaactctttctttcccctccttcaactcccagtatttattaaaaagctagttgtcatctgcgtggctctgccgcctggtgatgggggatggagacctctccatacagagctccacctcccatccccaccccgtgggcagccagaatcctgcggtctaaacaagcagatgtcagatggcctgagcagcagtatctccagtgtttgtttttgttcttgttttcagccatatggggaatacattttacacagccctggcagggaaaaatagtctaaacagagtcgtcctgaaaactttttgaaaatggagtatttccaagcattttttgaagacaagagtccattatggtgataactttcaagtccttatattaacaaacacgagtataagttttcagtcagttcacgtgaagtgcactaataaggaagcatggccatttctcatctctctccaaaaatgtcactcatccaaaaccacagaaaaagaggagaacactaaatggtgcccgtccattacacttaacctgcctcttcccctgaaatgcagaccatttctgggaaagctgcctgttcagatttttttttaacttaaagctaggaggttaaactgcatgaagtgtatagatcagaatgatatctgctgtgtctgaacgctcttctttgtgtagattgaaatgatcttatttcctctctgctggttctgggcatgagggtgagtctgaggcaaggagagaagatgagctccggcttctccccatctgcacagctcaggctgagggcttgggcagaccacagctccagacactctgtggtgccagggtggggacctgccaatctctgcccaaacaggacctcttcgctgccatgtccctcctggccctgagcttccaccaagacaggttccagttgctgaggaaggagtccagggttacaggctgtgagtccattgccgaggaccctgagtttttctggaactagaaccagctcagcttgacttagccatggcagttcacagaacaatagaacaacttcctagcctgggcaaaatcgtcctgagagcatccattagcatttcccagccggtctgcagtctggaacacctcacatggatacccgggtttctgggtcaggcacctgtaaccccagtgctttgggaggctgacgcgggaggatcccctgagcccaggagttcaaggtttcagtgagccatgattgcgccactgcactccagcctgggtgacagagcaagaccatgtctcaaagaaaaaaaaaagaaaagaaaagaaacctgggcttctgctggcctatgtcagttgactagtgggtgactcctggggcaagcaggaaagagcagagcggagaagcagcgagggtgctcaactctgttcactctgatgccaaaaggcccttcggcaaaatttcacaaattgtaccaccaacggatgctgattggacaggccagctggggcttcggatgttaagtgattatggtgataatgaaatatataatatgactttatttcagaggataccctggagtcaccccaccatttcagccctttccttccccagcacgctgcatggccgtggagaacagcttttccagtgcagactctaaagaaatggaaactacactttggttcattcacagattcattcaataggttctctatttaccatgtgccaggcccagcgggtgacaaggcaaataaaatacgcttgatgccaaccctcattggtgtctacagtgttaagctctgcgtgtgagtagaatagaatgcggagaggcaactgggagatgggtaagggagacttttctctgaataacattttgtatcttttgaattttgaatcatgtgaatgtatcaaaaaataagtgtaagtaaaaatatttttacaactttaaaaataggttttactggactggagcactcagaggacaacagagcggaagtggaaagcaaactaaccttttattgagcatttactgtgagctagaccttcagccaggtgctttatgtacatgatatcttttaatccacacaaccctggacaaaggcagtatcatcctcatttttatccattttaaatggaagcttgccaggtatggtggctcacacctgtagtcccagcactttgggaggccaaggcaggaagatcacttgagcccaggagtttgaaaccagcccaggcaacatagtgagaccttatctctacaaaaaagaaaaaatagccaggtacagtggctcatgcctatgatcctagcactctgggaggccaaagtgcacagatcacttgagtccaacagtttgagaccagcctggacaacatgatgaaaccccgcctttacaaaaaataacaaaaaaattagccggctgtggtgttgcacgcctgtagtcccagctactagggaggctgaggtgggtggatcacttgggctcaggaggtcaaggttgcagtgagccgtgatcacaccactgcactccagcctgggcaacagagcaagaccctgcctccaaaaaaaataaaaattaaaaaaaatagcaaggcatggtggcacctacctgtcgtcgtcgtcttagctattcaggagtcttagctattcagtgggaggatcacttgagtccaggagtttgagagcagcctggacaacataacaagacctcttctctgttaaaaaaaaaaaaaaaaaaaaaaagaataataaaaataaaaataaatggaagctttgggaggtctggggagtttcccttgtatcatgctgcccctgctgaaggaggcagcacttgaaacagacatggccagagaaagagatgggggtggagggaggcgttttcttcaaggggcagagccagcctgctctgacactatccttcctccctgtgcctctgggctgctggggccagtgtttagagacacaccctcagtttgctgcaggggtcagattcgtttccctctgccttgctgagctcagggaaggagcttgcagtctggttaacaggcagtcagatgacagcctgagccagcagtcgattctgtggctggaggaagatacctccccgagcccccagctgcccaaggagagatggcgcttgctctgtgctcttctgctgggtgtcagatgcacggctttgtctgccagctgaaggctggctggagaattgtttttccaattgtctgacccaggctccttacttgcacttagaggaaaaagcatccaagccctggtacaaaaggtcctcttttcattcctttggaaaaagagcagtgaatgagctcattatcactgcaacccaaaaaggaggaggaggggaagaagagaaggtggctgctccccactgcctagttctgcccctggccaggtttcctggggaagggggcctggatctggcccatagtggccaaggccagatggctgggacaggtggtccatactgggggcagcgctggagccattggatgctttgaaactagctttctctgctgtggtccagaagagggacaggtgtctgtgccccgtctcatctcctgaacgcagagctctatccaggactgctggactccaagaagcaaaaggccttccatttgggcctaagtgcctgcctcacctttccttcccagaggtttctgtatgcaggcgctctagaaatcatcctcactccccagagcttgtggtcatacagtatcagttatctgttgaatgcttatgatttgccaggcactaccctaggcactcagggtagcatggaacaaagccggcaaagtcttcactctcatggaattgaaattctagcgtgagcaatgagatggccaggtctggcctgtgattgcagcctctccccagtctctgctggtctgggagaactgctggggagtgacatagagatgccttgaaagggaggctcttcagtatttctagcagctaagcccagactgtcaccatctcactcccttcagagcagtacatcggaccctgtgggctggggccagagaaggcctctcttagacctgagcagcagagtcctgataccttgcaggctggtgctggtcctgggaagcatctgaaagagacctggaggtcagaccccactggcgctgtggtgagctggtaaggtttaccccaagcctgactgcctctcctctttgttctttcttccatttcagattgagaaaatcatgagttctattggagaagggattgacttttctcaggaacggcagaagatctcaggtaccgtactaagtggccattttccccacagaaactggcagtctggctcttttctggctcaggctttcctctaacacagaagacagacattcagtgggtgggagaggtcagcttcagaccacgtcatgctcctataattcagtctccaatacctagacagccccatcttgctgttatttttagagccatgactccttttacatatgggaggggaaaagggacaaaatgaattttaagctgcctattgggaaaaatttttagatcaacaatcgtaacttattcattattttatgggctttcttagatgggcttaaatcagagtgcacctcagcgttggtctctgcagcttccaagatggctctcaagagtctcatccgtgatggtggcggagcactgggttagaccaggggtctcagactcgtagcatgcatgtgaattgcctgggagggttgactgtgctgtttcctcttcccacagctccttgtgcctgactcagtttacttcatcacttaccattcttacactgtatcactgctactttggtcattcttttctaagccctagtagtgaggccagcttctgttctctttgtttgaaacagggaatggggaggccatctgagctgttttatctgatgataggattgtgctgtgttgctttctcaggcgagatgctcttaaagatgcctctcagagcagatctcacacctctcccccaagcatccaaagatggtctgggcactggggcatccaggctgaaagcagcccagctgggagcctggcctgtcttcaccttcatggaaatgcctctctgccctgaaggggtggaaattcttgctcactcaggaggctccatccaggattgacctgtcagtctcaagtgacacctctagttcctccatgggcttctgtggccctgggcaggaagtctgatgggtgggcttgagtgtgcacatcagggagaaaggaacatcagagaccacggggcctggtggggacgggctgggctctggagcctcacagccctgggttgaaatcttggctctagagacatatgtgtcttggcaagtcacttaatgtctctgcacccctcaccccatatctgcaacctttggataatagtgtcaacctcacaggcttgctgtgaataagtagtagataaaaaaaaattttttttttttttgagacggagtctcactctgtcacccaggctggagagcaatgacgtaatcttggctcattgtaacctccgcctcctgggttcaagcgtttctcctgcctcagcctcctgagtagctgggattacaggcatgtaacaccacgcctggctgatttttgtatttttagtagagatggggtttcaccatgttggtcaggctggtcttgaactcctgacctcgtgatccgcctgcgttggccttccaaagtgttgggattacaggtgtcagccaccacacccggccctgtgttccttttgtccatgaaatcattacttactcatatcgagaaacctagagaacagaggcttctgctcactggccgtggctccctccacagttttcagtcctggttcccagagccaccatcgctccagcagcaatgtttccctgggtgctagcagagagggctgagctgagcttggtccgttttcgtcagtcttggattatgctggagtctgcagaggtggctttcctggctaaatttgtggatctgttttcaggatctgttgcttacactcagtcaagccatctcacactctgttgtagcttgcaagcttttccaagggtcaagtgtttgcgggaaatggatgttcaggactgagacaaacactgttaccattttcaaagctgtgctttgaccacagggatgggagggatagcagtcagttccattgaggatggtttctgctttctgtgtccaaggagcaggagccaaaatcacttgcatatgcttgagagctgtgagtcagaaacagccattgcctcttggatttgataagtcgggagatgtggcagcacctcgggaagagccctccccttggaagggttaatgctgagctcttcccgtgacatctggtctcctgtctgatcccacctactagttttttgtttgtttgttttatttttgttgttgttgttgtttgagacggagtctcgctctttcgcccaggctggagtgcagcgcggtgatctccactcactgcaagctccgcctcccgggttcacaccattctcttgcctcagcctcccgagtagctgggactacaggcgcccgccaccacgcccggctaattttttgtatttttagtagagacagggtttcaccgtgttagccaggatggtctcgatctcctgacctcctgatccaccctcctcggcctcccaaagtgctgggattacaggcgtgagccacgatgcctggccccacctaccagtttttgtcccccgtgaacccatatgagtgttgagaggcagtctgtctctacccttgggtttttggatcccagcacacagtcttgttttagtactcattttcttgaaccatcctctatagtccagcttgggaaagtcaagaacaggcacatgtgggggaccacctaaacagcgggttcatccacccgggctgcagagccccaggctgctgtgtctgcaccactgccaggtgctgaagcgtggagaggatgggctcaggcctgcccatgaaccctgtctgatgggtcaggagggggctttccccaggatctcagggagtactgtcttcagcttggaccaaaatggaatcactgtttattttgactggtcagtatcagggttcagattgtccttgggttgggcgtcaggatcagggagaaaagatctgggctctggggttagtctgggtagaggaggagcaggccctccagcaggcagccctgcaccaagtgtgggattgcccagcaccactggttttgcagaggcgcccgcaccccccagccgaagggcacgaccacagcattggagtctcagttctgtttttagggccacaggcccctgggctgccaccactggagctagttagctgaatcgccaacagaagcgtttacagctaactcatccctgtgccaactcccattctcaggagtccaggagggtatgccttcccactggcccaggccactctggctctgtcaacaaaggccttctccgtcaagcagaagggaacttgcttggctgtcttctgataaagccagccatgttaggtattgagtagctggtcaagcaggatccttctggggcctgatgagaaccctctcttttccagggctcatctacagcctattgggataccagtatctcccagcatatttagagggtaatgtgtccagggcatatttagaagccctggacttctgtccctgtacctgttttatctttttggcctgtctccatctgtacttgggatttggccctggtttcccccttgcccttggccatcgctgtcctcccccagagtgtgagtggcctgctctggggtggggcacttcccctgggctctaacaggccccaagagaagtccgtccccaatttgtttggtatactcacctaaggaacatcaagtgtaacggccttatttcattgcctgtttttataagaagcacagtcattcgtaaagtggcaagtaggggggtcacttacctgtgggctatgccctttgggtctggtcattcctgtgtcctctcctggctgtcctggaaactgtcgaacaaagctctaggagcagtccctctctattcttcctgacaagctgtttccagcccctggagctagaggtaaagtttcatatctccgcccttcatatgcatttgtgcagccaacatcggctattgggaaatctgtcatttcgctctgatgctagtgctgctgtctccttctccctcagcagccacagcagcagttgcttctgctccgatgtgatgtccgatccctgatgtattttcctgagcttggaagggggagggtgaggaggggaggaaggggagggccagacattacgagagtgagcaaggactgtggagccagcagcaggcagcgtggagcccaggagcctttagacaaagcattctgctgcggctctgtcagcgcgcacatccaccggcagcaggcaggaccacagctgcccggctgggggattacaagcaagaatgaatcagcacccggggacacttgacttcatgggcatagaagaacctgccacgtaggctcctggagcagacttccccattcaagggcaggggagctcaagtatcccccagactcggcatcttggagcgctgcggcagcgtgcatccagaaggccgccgggtccctgaccatcatctgttctgcaggagacagaggagagggagtggaggctggcagagttggtcaccagggtcttgtagataaccaaggaagttggcattgtcctgccccaaggggcagaaagtacctgggaacggcagaatgactttcaccgtgtcaggagttcactggaggtgatgtgtttatagttggttcttccttttccttccttgtacctctttttcctccttttcacttttttctttctttcatctgttcttgcccacaagaatcagagaagtaggttggggttcaggcatccagctcagaacatccaaggtctgccagaaagggctgaacttctgtcctccctgcaccaccaaaatccccatgctgatcgaggagcaaatagatgtcctcccttccctgctcatccttagaggagaacgccaagatccagagaccctgggacgactgtggctgtctttatcactcagccaaagagagaacagcgcaggacgtgaatagacttaagccgccacagctcagctgacagaggaccacttcctttttctctcttttatctggttgggttttgtcttctttacccaagaactgaatttgcctgcctgctttctacctgagcaggcaggtgagtcactggaacagctgttatcagaagaggaaaatgaatgcccagcccctgaaaaccagcctggcccaagaaggcaacacttcagacggcgtgctggcccaggagacgccctgcttgccagctgccagagtctagctgtggatcgggctcctggcccactggccgcgcagcccggcggaatgcgatgctgccgtcccagcagagccacacctgagcctgacccccgagccccggcccatgtgccccattcagccccttgctgccttgagcctctgagcacaaagggccggtggccatggtttgcttattccgggactgctgggggaaaacaagtaaaagtctcttttctccccctgccgtgttctgtgctgcttgtgttgcatgtgctgggtcccggtgaacagccgccgctgctgcttccctcccggagccctcgctgtgtgcctgtgtccctcagctgcatgaagatgtgtgctctctcctgactggtttatgctgcaaggtcgcagaacttgcccctcgccacggccccacaggggctccagaagttgcatggatgagaggagcggcggggcttgtgggcacttaggagctccctcagccccctctagtgcctgtggggacagactttctgaaatatcttcagcacgcacgctgatgaggagttgacctggagactgttgggatttggcttcccccacccccgacctgtgggcagagatcatgcatgtgcagccgtggccctggagcagctcagacctgggggtgtgagtgggcagcagccgcccgaggctgggcagtgtgtggacagcaccaggtggtcctgtccttggctgtacacagaagaggagctgcgtgtctgctgctctctggtctcttgtatatagtttggctgtttgatggtaatgactatgatgtggcaatgccatctatcttcctctgagtgccgctgctaccgccttaatggtttttcccttttcaagcgtctgccgattcctctctcatcaggtttacggacgctggagcagagtgtcggggagtggctggagtcgattgggctgcagcagtatgagagcaagttgcttctgaatggctttgacgatgtccacttcctggtaagtggctgcaggcctcctcaatggcagggtgctgctcagtggaaacaggcctccctggcctcccctctggccccacaggagtctgcaacagtacgtagacccaaatcccagggaaagctcactgaggtcactcagacaccaggaagtcagccaggtggtatgtgccttcttcccaaactgtccctctccctctgccccagaaacggctccagagggagctctctttgcagatctgcttcccaagaaggagggtccctgattcagccctgtgtcccctccctggctgtgtatcccatcaaggctgggtacgaggagttttatttatttctcaaaacttggtgtcaagtgagttgtcactgaagcaaggagccttgcctccagcagaaagaccccttccctgcccagccaaggcccagtgcctggggtagagtccagagttacacagccttatatacccgtggcctcagagatggcccagaggaaaggctgagttgatggcctggaggattggttgcttctttgagaagctctctcacaaaacacaaagggccaaaaataaaaagagaaaccagggtgtttcctctggatccctgcagaatagggacccatttaggaccctgggctcaggatctggtgcacactctgtcatttcagaaagtagctctgatcagggtacctgtcactgtccctctcttggaagcccttctagaggcatctgcatgcgccgggcctgcttccaggagcaggcatttgagccaaagttagtgatcatggtcgctgacacttctcactagcgcttactgtgtgcttggcgccgttcttagtggtttgcgtgaattagctcattgaatcttcccagcagccctgggatgtggactcgtattaatccattgcccagatgaaggaaatgaggtaggtcccttgctcagggtcacactgtcagtcattggcagggtggaaatgtgtgtccagtgctctggatctggagatcaggctccagccactctgctgcacagcctctttcttctctgtggatacagggatgggggcgtggccacctatgtgctttatgtcaccttctagcctgagtcatcttggtttgagttagacccacccgctccgaggggatctctctcacctgtgcccgccttgctccgctgcctcagttgagggctggggtcagagtcagcatgcagctcgcaccacctgcactctgttctctaatgggggcttctgagggtttctcgctgatcgggttgtgtttggtgcctcctgaatagtggcctgcccagggagctggcctgaggcttccaggagggacccacctcacccagagccatctccaactccagggcaaaagatactgtggtgtgcaacaatgcaccctttccaagccagctttgggacagttaattttcagcttttagaaatcttaagttttaaaatagcaattttttttctttttaaaagttaaactgaatgtatttatggttcttatgacctaactcctgactcaccacgttcctcggggaaggatgacaaactcggggtggagagggggctcaggcaatgcgtggggacccaggttggcccctggctcggagtgttgaggggccttccttctctcaactcaccccttcctcaggctggccgtcagatgggcaagtgagggtggtcttagggtgttccctccctgtacttcaagatgctagaggctgagctgttgcttcccacctctccttctgctgattttggaaagaacaggattcctacccctcaaatagcccgagactccgtaggactggagcagagagcagctgagcaggcctttggagaagtgtggccttgggccaaagcttcatgcacagggcagggcctctgtaagatgcgtctgttcctatgctagaaggaccctcattgagggcggcctgcagctcagtccttccaggggctctcagtgctggcaggtggagtctatacaagaaggaacgtcgagcacccctcgggtgagccgggacctcagatacctagagtggcctgctgtgcacagcatcctgggtaaccacgtgtgaatggccaggtgggctgtcaggcaaattatgttttaacagcctaaaaaaagaaggcaacttgggaaggggagcgtttctgttattgaaatattccctcattgcatgtggataacttacattgcattagctacagtggatcccatgtggttaggtttccaataggctacaatgtttcccttggttctgaaatgccctggagactcttctacaagatgcagaagtagcttccaggaagccaggctggacatgtctgaggagcgtctggaaactgaggctgtttgacagtcatggtgttgctgtgggatctccctgtgatagggccctgcgagttgtcataggagaagtacagggcatttgtgcacatcacacagctccctctcagagtggaagggactgtaacgccatgtggtctgatcgccctctctgcccgaatcccttccaagtagtctctgccatgatggttttttagtgacaaggaattcactaccttgtaaggaggttacccattcattctttgcattgtactggctgatgtagagcattctttatattgagtcaaaatctgtttcctgtggcttctgtctcttggtcccaggtttacgttttgggaccacacagaacatgtttaagcccttcagaaaattgaagacctctgccccaggctccaggtgccatgccctcttattctcctcttgtgatgtggtgattgagctggacaggcaggcaacttgaactttatccacactgtcttgcttacagacagaaagggcctttgatttagaggggcagggccagggcagtgggggctgccaggtgctccctaggatggtggaactgacaccagacgcagggagagagggaaacgtggctcacacatctgccagccagccagcccacgagcccaccacactgcacctgcatcgtagctggttccattttcaccacaaatcttatccacaggaaatgggctttcttaggagaagggaggaaatgcatttaatcagcacggaaggaaggtaattggtggttggcaaatttgtagctccgggcgtgctagcgcaggtctgatgcccttcactcagcctgacgcccttcacagaagtgttgattgaataaacgatggtggtcctgatgctggagtgctaagtagatatttaaaaaaccacatttttgaagaattgctaatgtggggaatgtcccccttgtagtgctgagtgaagaaactgacacagaaattcacaatatgatcttaatttctgaaaaagaaaacatgtatgcataggaggtgcaagggagtgagccaagatgttttcagtggctatctcaggaggactccgggggcttcattttcctctttggagtgtaatcgtttttctccatttcccaccatgaatagatgtgaaatcagaaaagcaaataacgtaggtgtcttaaggaacttgatggtccagctgggaaaacaaagcacataaaagagcagccagtgtcaagtgcagcggaggctggcaagcaccgccagcagaggaggaggcctggatggcagagatgctgctgctgcccaagtggcagagccaagtccaacctcgaacctctgggttctgctgtctgtcccaggggtttcgtagagatggtgggacttggaaagatcacagagacaggaaaggcctgctgagaggggccaacctgtctctggtgagggaggaggctgctggggggcagtgacgggcagggccctgaccaggcgggagagatggctgggcctgacctcagggctctcgaaagccacgtgtgggagagtcccaaggtctctgagccctgggcatggggggatggtctctgctagtgccccacaccaggcaaaaagccccttgagtgaggcataccttagacatccagggcacagctgagagcccacgtgtggcaggcagtcatggctcggggcagtggacaaatggaagatggaaatgaggctggcagcaggctcaggaagggttagaaatggatactgagtcggccaggccggatgggaggccgcctgctcctcccgtcaatttctttctctgcaggctcctgctacgtggcagataggcccccgctgtcttcctgtgtgtttctgaggtggtgccagcttgttcctacgtgttggagagaaatgacagataaagagaggccaaaggcataagctggggccaagaggttcttctactggcttctttgaaactttccaaccaggtccccaagcccctgaggctcccttcctgttcctgtcccctggatttgctcctcactctccagccctctaaaccagcttcacgtgaacagtggggcttgtcatcacctcctatgacatccctccttttgccttcttctgccccaggcccaagaggccactgccagcctaagcgagctgccactgggcaccattatcagaatggtcatggccaagaggccctctccccagcccccacctccacccccgtcccatctccctgcacagcactccatgagctgactgctgtcttggagttttctgcccagttgaagcagagccttaaacaggaggatcagtggagctgaggcttggaaaggaaaggaatcctcttagacaagtgtggatccagcctcctggactagctaaattctgtagtcacttaagaatgtaattcctcggtatcccaggaggaagaatgtaattccttgctatccaaggaggaagaatgtaattcctcgctatcccaggagttgatgctgcaccagggcctcaccatctctgccagactctcccttggtctcgggagcctgaccaagggcagcccttttagcaagtgagacaagggacaggctcatttggggcctatttccagcgagtgcacctcttgccccccctccctttcactgcctgactgcagcgcaggcattccaggtgaccagctggaatcactcaggagccctcctctgactgccccaggtactgctctggccttctccagtcccctttacagtagaaggaactctgggaacattctgaatgcctgttttcatgcctgctaatttgaccaactgctctttaaagtggagttggactggctgacagatcctcttccgtcgctcctgattgctggcctcgttgtgagcagcagcagaggcgtctttcctggcacctcgaatgtctaggtactcactcagccaaaccccgcattgcgggctctcagtacggtaatgtgcccactgtcacccctcaggtggcgtggagctgggactggcagccacgtccctggacctggagtggtgcttccacctcccaatcttcccttcccaggaagatgcagcccctggggctcatgctcatgtgccctcacaaggttggagcctggcactggggcccatcaggctgggtgagtgcatcacccctgggctggtccaggtcagacgtccacccactgcatgttgggagccattcaaccataggctgagaaaggagctggcaaggaatgagatgcagttcggctctgtgcactggctcaggccccccaggttcttctgggcctgtgcagccaccaccactgcctggcccgttgcttctacccgcctcctccccaccctgctctctatgaagctccgggttagttaagtaaactggatgggggaagctcaggagaactcaagagtctacttagtggcaaagggaactggaccaggagtcaggagagctgggttcccctccaggtccccgccctgtgtgactttcggcaggttacccttcctccctgttcgtcgtctgtcacgcgggccttcatttgacctacttacttcatgaggcataaactccgaagaggacacagtgttatgtgtggtgacatcgtgtcagagagcaaaaccgcatgtaaggacgcaaggtgggaaggtggtgtttttctgaaaaaggcagtgggcagcagtctttctctgcaggctgcagaggttggttttgtctcagtcttgtcctcagatccatgagttaaagctgctttgggtggtcttgggaccaagcctctgactccagactcacttggtcccagcagatctacacggctgatttgggggtgactgtggcaccttgacctcagccaagacctcaaagaggaaggtgtttcaggatggcaggcaggagatgagtgggaaggctgccatgtctgcccacagagagaatgggggcaccaaggacctgcttgggagaacaggggtcagagtgggggggtgctttcatgaaactgggaagagtttcccaaacccatgtgctgtcatatccatccttgagagcccttcccatgacgtgacagataacaagggcctcagaagtcacctgcagaggccttaggaactggtaacacttgactcttcctggtggctgtcaccactgagttttatcccttgaggtgaggccaggggtggctggggtatgggataggaaagcagagagctgtgggtgggtcaggccaagtggttcctgctccttctgccagctgttagttgagggtaggatgtcaatgtggggctactttgggaaattctgttgcagagtcctggcagagcagatgaacaaaacagccactgagcgcctgattcctgccctcaggctgatgctgggtagcaaaccctgtgaggcaggcggttccactcttgtttagcaggtcctgctttcttaagaaccttgagcagctgaaccgggattggaacccctttctaccacagctgctttgcatagtagctggtactgggaaagccctcgccccaggtgggtgactgcacgcaggcctcagggagcatggcttctatttcccatcattattaagaattggggccatagtggtgagtattagagagccctgtcccctcctctttgctttctgtcccctctcccgatggttcttcctgcccccacccccgggccagccccacagcagatgccctgggactgggaggaaacatgtgctccccctcctctctgggcccatgcaccatggccattatagccccagcctcagaagttggtcctggctgagaccagaaacctgttgtgtgtttagtcacctgcaccccagacgaacgtgctgagtaacatgttctggggactgcataaaccacctgtagtagcggccggccagcattagcaaaggccggagaagcccgagtgcccagtggcagggtgagtgacgggcgtgcttgagttggtgccgtcgccacaggtgttgataaatacagtgaaatgtcatgggggatattcacatgcagtagatgggcatgttaaaagaggcaggttaaagaaacaggtggcaagtggtggggaaaaaaaagaaaaactgtctgcattcagcctataatcccaattttgctgaagttttttttcctaatatatagctcagaaaaatacaccaaaatggtagaagtgatcccaatcttccttttttaagaaaattaattaacttaggaagataacaccgaacagtggccttatgtttccccctgaggtgatagacttatgggtagcttttacatttttctttgtacttcattttcaatttttttttttttttttttttgagacggagtttcgccctttcccccaggctggagtgcagtggcgaaatctcggctcactgcaacctctgctccgcccccagttcaagcgatttctcctgcctcggcctcctgtgtagctggaattactggcgggcactaccacagccagctaatttttgtatttttagtagagatgtagtttcaccatgttggccaggctggtcttgaactcctgacctcaggtgatccactcgcctcagcctcccaaagtgctaagattacaggcgtgagccaccgcacctggcctattttcaaatttttctactaataaacttgtattattcaagaaactcaaaagaatcttttagtgtagggaagaggtcgagggccaggagaaatccatcacgttcttagagacagcgtcagtgtcacagtgtcacggtgaaccagcctgtgcctggggaagctctggggtggggaggagcaggcagggaagagggcagggccagccatgcctcccacatctgcccggggtttgttactaagctttggcagctcctctcccagaataggcaggccccaaaactcaatccagcaagggtgtggctttgtccccgcactcagctcttcctaccctccctactcttggttagcggaatctgcccttgtggcctaatttgcaatttctcgtgtgtccaggttctccccgccacataccccctctcccctcttaggagggtcccttcccacagtgccctgatccctgagtctgagaaagggaatgggtggtgaaggggagaggctggagggctgcagggagaagcaccttgtaagtccaggatcatagctctgtctcgtttcttctcttgcaagagaggagagttcagccttgagtttcctgtgactgatggggcagtcaggggaactggcaaagtgaccgtctgagaagagacaggcagactgaacatggaaaggagggtggagggggctgccggccgagtgtaaagtctggagctagagtccaggctggcgcagctctggccccaagaatcagaatctagtggccttggtttgggtgaacgtccaatgcaagagagggctgacgtctggccattggtgggcccaggactgcccctccacaccatggcccatggatttcatcacaagactcaagccttccttccctgggctctccaggacagagtggggcaggtgatagggtggtcccaggcctttcccactggttcaaggtcggtaagccctgggccctctgccttttcccaggctccctctggagacccaagagtgggaagagtgacatcccccacacactaggctttctgattgtggttatgaatgaagcctgctttcccaaactgctttttatctgctggacccccctcctgcagtcccccaacccccaccattgtcccttgtccctgccccatccacaggcctcagcatgtgggctctgggtcaggctctcagctccagccacagtctgcttggtgactttagcaaagtaacttaggtctcttggtattctcctccgtcaaatggggctttcacccctgtctacagtggagctatttagaggattaaatgagattagtgcaaggcacttagctagtgcctagaacacagagggctgacaataattttttttcttttaagatagggtctctctctgttgcccaggctggagtgcagtggcgcagtcacagctcactgcagccctgaccccccaggctcaagtgatcctcccatctaagtctcccaaatagctggaactacaggtacacaccaccctacctggctaatatatatatatttttttttttaagagactgggtgtcagtccgggtgtggtggctcatgcctgtaatcccagcactttgggaggccgaggtgggtggatcacctgaggtcaggagttcaagaccagcctgaccaacaatggcgaaacccagtctctgctaaaaatagaaaattagctgggtttggtggcacatgcctgtaatcccagctacttgggaggctgaggcaggagaatcgcttgaacctgggaggtggaagttgcggtgagccaagattgtgccattgcactccagcctgggtgacagagcaagactctgtcaaaaaaaaaaaaaaaaaaagagactgggtgtctcacaatgttgctcaggctggtctcaaactcctgggcccaggaggcagtcctcccaaagtgttgggattataggcattgaaccattgcacctggccctacaggggcatcaatagttgtcacctgtgtttagactatgactggtattggtggcagtgtcgtcattttcagctcttgcagtctggtgcctctctgctgggtcttccaccaactctttcccagcttaacccccatcttcctagaaagcctcctttcccatctcaccccttccctttccaggtctttttccgatcctgaagagactagctgagagtctagcacctctcaaaggtctgaatagaaaacacttaccatctattgcctctaagggtgaatcacctaggacacctaatctacataataggaaccttggtccccacaagcctttatctttttttttttttttttttttttttgagacagtctcactctgttgcccaggctagagtacagtggtacaacctcggctcactgcaagctctgcctcccaggttcatgccattcttctgcctcagccgcccgagtagctgggactacaggtgtctgccaccacgctaattttttgtatttttactagagatggtttttcaccgtgttagcctggatggtctcaatctcctgacctcgtgatctgcctgcctcggcctcccaaagtgctgggattacaggcgtgagccaccgtgcacagcccacaagcctttatcttaacccagacacccctttcttttttctttgtgtgtgtgtgtgtgtgtgcgcgccaaagatttatttcttcatttcttgcatttgaaggactcttcgatgacatccttggcctgagactccttgccatagtccttaactactacacaactgcaaccaaccactttccagggtttcccctctctgtctattttacagaggcctgcccattcccctagtttcttgttgtcatcaaccttacttaggttgatttgccagacacctctttctattgactccaggcctttagataaactctttcaactagttgccaatcagaaaatctttgaatccacttgtgacctgtaaggccaccacccccaaacttcagctttgagttgtccctcctttccagactgaaccagtgcatacctcacatatatcgcttgatgtcttgtgtctccctaaaatgtatgaaatcaaagggaagggaatcctctatagaatgtaaatttcccccacaagaggcagctttgcagggccatttcaaaatatgctaaagaaatatatttgggggtaaaatactttgtttcggggctgctgtctgtcatgcgatgccatactggagtcaggttggcactcggtgtcttgttgctacagagtccgctgggtcagtcttaggatctctgctttaatgataatgtgggactgttgtgcctgaattccacagggaggagggtgtaatgaggcaggtccaatgcccctacccatcatggcctgaacctgtttttcaggtttctgtgggatccccttggcctagagggggggtccattcagtttcctggggggctgatggttttatttttggttcataccgctgaggtaccagatgctgtctggcagagccacaccccctgagctggccacacgctcccagtcagaacttctctgcggtttggatgtgtcagggtcctgtttccagaagatccgttaaagtcaaagcaaactcctacctaccccggcctcgtggagccttcctgcggtcctgccatttgccccatcctgtagacagggctgcaggaagcagcccagccagcaaccagtgtggagggagagggagtccaaggcccaggccggcccctccccatctggggctgccctgcaaccctcagtggtaacttaggacagctcctatttcccctttggctaaaagggtctacaccagtgtgtcaccactcccaaacagtccccttcctgggcctttgccactttgttgaatgaagacctcacctgcagttaagcaaaatattaacacgtgagatgcctttcaagatgcaaaaggatattttccttctaaaatcacatgggcaggaaggctctgaagatgttagagccccagtggactggagaaagccaggaagaaagcagtgtgggtcctgcagtagcccctgccgcttctcctgcctcctgctctcccaggacgcccggggccgacccgggccgacccttgtcatgctccttccgttcgcctgggcctccatgctttcagctaccttctgcatcttcaggtggagcccagtgacagatactcgcaggaaggagaaagcattcaaatggcttaggttgatggaaagtgacactgattacagccaccatggtagacgcttcacgtgtaccttaccaaggaagggcacccagccacgatcatgggcgactctacaaacccagccccttactgaactccaataggccaggctggcttcttccagagtcaggctggcccttggcacagtgcccgtgctatgtatccagaggcctgggcccacatcctgaccctgtttctcccttattggaggccctggcatttctgaacccactcacctctaagaattggattctgtacagttaaaggaacagtgtcccttccccgagaggtggagaaaaggtggccaggagggagagggtcctgggaggagcatttatgcgcgatgctgagagatgggattctacggagggaggcagcattggctctcagctcagcaggggctgtgccccagcccaggacgggtgtcctgctcctgctgtctggcaggcgtctgcccgcacccccacactttgcttttgtcttcagtacaccctgcctgccccagcaggaagagccgaggaagacgactggggttggtcagatggggcctgagcagtccctttgccatgctctagtaccatggccttggataagtccagtctgctctccaagcctcagtttctttctgtgtaatgtgagcagctcctatctgaaaggtttattgggcggatttttgcaggtcatgggtgtgaagcccctagcacagtgctggactgtggtcagaactcagtatcactggcccgcatcttcactgtgagcccaggacaggccacacgtcacacgtcacctcccacaaagcccggcagagggtgcccagggaactcttgttatgcccagagctcagtgacccaggggagcacttcttgctgtccccttcccttgagttctccaaagcaggccatggccatgatcacaggctgaggagccaggccgccaggggccatcctggctctgcctcttccatgggagcactttttcctctgcaaagcggggagcagtcggacacctgccggcgatatgaagtctgagcgagtcaggacagggggaggcccagatcccaggcgaagatcagtgctctgtcccgccttggttgctgggagccctcctgtcccctcttcctcagggactggacccaaaccaggccaggccggaagactagttgtgtgtttcagatgtcacttggagttgtgaagcttttatcaaagctgagacaatccctgttaactaaaatccctaggacaatgaactgttgtcctttattcacttcctaattatagaagtgtcctgccatgtagtaagtactcagtaaatgttagcatggtagcagataaagtagaaaatctcttttcccccatgaccctccttgtgaagaggtttctaaaagccagtggtcccttctccctgagtaaagagggtgtggtaacttccagaaacgtttcttgccctttgaggatatgtggcactgagtagtcaccacacaagctcatcccccggtgcggagatatggctacttcaggaattgggaggaccccgcgctgcgcccggaatgtgctctggcaatggtttgcctttcttttctgtcatttcctttatttttgtgtgtttccattcatctcttgttcctcaaagctgcacacagcccgcccttctgctggccaaggtctggttagcaaagggcctgtctccggcggatctggctttcctcgctgtcagccttcaggtgccctgaaagctggcgaaggtttctgagtcaatgctggggttgagtgggagtttagaacatcactgcggtgccgcagtcactcttggacgtccacgtcctcttggaggtttgaggcaggctcagctcagccgttcgctttggtatcctcataatcaggtagaaagtctgggccggggccaggggcagtggtgcacacctgtaatcccagcacttttgggaggtcgaggcaggaagattacttgagcttaggggttcaagaccagcttgggcaacatagtgagaccccatctctacaaaaaaaaaaaatagccaggcatggtggtacatgcctatggtaccagctacttaggaggctgaggcaggaggatcactcgagcccaggtcaaggttgcagtgagccatcatcacaccactgcactccacttttaaaaaaaaagtctgggaaggcggctgcctctctctgcctttctgcaacagcagacgttagatttggtcccagagccactgtaggaactctgtggtgactctcagatttgggggtgacttggctggcctcagacctggagtggtgcccaggcctcgcttgtgcccagcaaggggtgtgttctgcaggtggagcagagtagtgggcttccagcctggctttggggctctcttcacctgggctctctgaagcttaagtctggcagtgtcctctgtgggacaacgtttatgtcaccatgcacaggctctggggagactcccgtggccagcagtcaccacacggggcgggggccaagcaagtcatggtctgcatgagctggcccaagtcacttagcttttccaagtgtaaagtaatgcccaccacaacagagtaaaagtccagaaagaggcccagaaatacacaggaatttcagacaccatagaggccattccagattggggggaaaagatagctcatcaagaaatggacagcttgctgccagggcaaaaataaggttggatcttgactcttacaccttacagcaaaataatttccagatggattaaagatttagctataaaaaaggaaacaaattacaggaaaaaatatagaagaatgtaaaacacaatcttggaaaggcaagatctttttaagcctgacataactgagaagctctgcaagaaaagttgggtacacttagctacaaaaaatagatttctacatgaacaaagccagcataaaagccaaaagataaatagcaaactggaaaacaaatatctaactcatttcatagataaaaggttaattttcttttttttttttttttttgagatggagtctcgttctgtcacccaggctggagtgcagtggcgcgatctcagctcactgcaacctccgcctcctgggttcaagcgattctcctgcctcagcctcccgagtagctgggattacaggcgtccgccaccacacctggataatttttgtatatttagtagagacggggtttcaccgtgttggtcaggctggtctcgaactcctgacctcatgatctgcccacttcgatctcccaaagtgctgggattacaggccgagccaccgcgcctggccaaaaggttaatttgctttattttttgttgtatgtacacacacatacacacacacttgtgcacacacatatattgttgtttttgtttggaaacaggctggactgcagtggtgcaatcatggctctctgtagccttaatctcccaggctcaagtgttcctcccacccagctttccaagtagctgagaccacagctgcgcaccaccattcctggctaatttttttatttttgtaaaaacagagtctcactgcgttgcccaagctggcctcaaactcctgggctcaagtgatcctcccacctcaccttggcctccaaaagtgttgggattacaagcgtaagccattgcacctggccaattttcttattatgtaaagaactcctacatagctacgcagaaaagaccgacaacttcatagaaaaactctgaggctgtccgggcgcagtggctcacgcctgtaatcccagcactttgggaggccgagatgggcggatcacgaggtcaggagatcgagaccatcctggctaacacgatgaaacccagtctttactaaaaatacaaaaaattagccaggtgtggtggcgtcccagctacttgggaggctgaggcaggagaatggcgtcaacccaggaggcagagcttgcagtgagctgagatcgtgccactgcactccagcctgagcgacagagcgagactctgtctcaaaaaaagaaaaactctgaggctataagccagttaactcaaggagctctgggtgtccccaagtgtgcggcaccagggccatgtggacagcagcattggggctgaatctggctccaaatgcacttaccatgtgaccttggcaagtcaccagggctttatgggcctcagcttcctcagttgtagggtgggaataacaacagtcccaattttgttttgtttggttttgttttgtttttgaggtggaatcttaccctgtcgcccaggctagagtgcagtggcgtgatctcggctcactgtaacctctgcctcccaggttcaaaatgattctcctgcctcagcctcccgagtagctgggattacaggcgcctgccaccacgcccggctaattttttgtatttttagtagagacaggtttcacaatgctggccaggctgatcttgaactcctgacttcaggtgatccacctgcctcagcctcccaaagtgctgggattacaggggtgagccaccgcgcctggccacaatagtccctattactaaatggcttgggcaggtccagcgtggagtagggagggagtgctttggaaatgctagatagataaaacgtggaaagatgctcatcctcacctctggatgagatgatcctactccgataagaaatgtgcaaattgaaactgcagggagactctttccctgctgtgttgctgatggtgtgggggatctagcactggcgtcactaagaagagcagaaagagctgtcagtgttaaggcacgcacccttgattcaagtaagcagaaacccttcctcataacaggcctagacacgacactcacggggagggtgttcatgcagcactgtgtgcagtagctgaagttggagcaaatgtccttcaacagggaactggctgaataaattatagcatattcctaacctagatgatgctgcagcttgtccaaaggaggtgggcccacatgcactgctgcggaacaatctcctgtgtatattccgtgataagaacaaggcaccgagcgtgtgcgagaatggcatttgtgtgaaaatgcagtgtgcaggcacaggcctgtctgtgcccagcggggctctggggacgtccaggaagtggcagcagctgcaactgcgagggcctccatggctgagggatgggcaggacctgtgaattttgcatcataggccacactgtgtattttaaaattaaatctgctcacactatcttgtgacttctgtaattagagacgtcctcgcaggggccaggagcgtgaaggagagagtcaggctgcccagggtcccctcttagctccaccactagatgtgtgatgtcaagaaatttctgacctctgtgtgcctcagtttcctcatctgttagattaacgggattaacagagaccctaacatgcaggttgtgagcatgaagtgggatgcgccaggtgaaagctctcggccctgtcatatagtaagaaaggagcaggagcaccagcctccgcccccacatccttgcatcgtgcttagcgctgcaggtgggcgctccgtgtgcctctccaccctcagctgctccgttgaggccagtggaggtctcagaaaacagcacggactgggctcagctctgacccacccttctccctgggacaaggacgcccttttctgacagtctcccccttggaggcttctctccttggggtgaggctgggtcctcgggtacccaagtctgtcaccagccacccgcctgaggtggttgttacaaccttagaattataaaatcctgtctaagaggaaccttaggatgagtccactagttctttatcttggatgcatggaacctgctccccagaaaaatgcacacacactcagggggccgggacttgtggctgggcctgggcaggcggcacccccacccttgtgtgccctggccggcctcagcaccctgtgcatattctggagccccagctctgcctagctcccctgggagccgcccggatggacgtgggcagtctgggcagacttgtccccatgccctcttggtgcctgcagtgaaggagaatttggtgcagggccctgaaaggcccacctgaccccctcagggccaccagccatccatccaggaggggccctgacatccacctttctgctctcaggggtctaatgtgatggaagagcaggacctgcgggacatcggcatcagcgacccacagcaccggcggaagctgctccaggcggcacgctccctacccaaggtgaccatcgccggccctgtagcctcagcccgtgcggagccagggccacctccctagcaccacctgcaccaagaacaggggaggagcagggctccagcacacgcacatcatagcaggacctctacccctcaccctaggagctccggaagggccgcacacaaccctgtttgcttcctcactatgccctaaggcccttggagagtcagcagagccctagggcagggagcaggctcctctggggtcatgaggaggttctgggggtctgcctggcccaggagcctggtacccgctggcttggcctttcacccagagcccccttcatggtctctctggctcactggagccctggccagcctgcactgagccctggcaccgggcccctccccgagtgggcttgagggaagtaccgtcttccctggggagccaggagctggtgggcctgagcctctcccctgcacttgtgctgaatgcagtggccccgtcccttctacctgtccagagcttgggaagcgcccgctctgagggcacacactattctcttgtccctccaggcccgtgacctcagcggagctcagggcggaggcgttctgcagaccccccctccctacctaggcttgtctgctagggccatcttccagccctgtcggtgctccagcggctcctgccttccccatggggaagccgagaccagcaagtgataggaaaggctgtgcgaagtggggggctggaaggtgctgaggaccccaaacacagagggccccctggccacagtctgtgtgagctggctgggtccatggtcctcgggtccctctcctgtgagtgctgagatgtcagtttcacctccctccttgccctgtaggtgaaggctctgggttatgacgggaacagcccccctagcgtgccctcctggctggactccctggggctgcaggactacgtccattccttcttgtcaagtggttacagctccattgacaccgtgaagaacctctgggagctagagctcgtcaatgtgagtagtccctgcgtggcccggcctggactctccagaagtctgagcttcccttaggggcagcctggcccagcggaagatgctgggggctggagcggactgtgagtgagttggccacctgacctgtcacctcgctgctcctcatcacccaggtcctgaaggtccagctgctcggccatcgcaagcgcatcatcgcctccctcgcagacagaccgtacgaggagccgccccagaagccccccagattctcccagctgagggtgagtcggggagggacagaaaggaatgtatgtttgttccctgtatttgcaggaattacatagaattctttaggattcttcagagaccactgtagtgtaggagaaagcagctccaacaagaagagaggagtacaggagaggaggtttagagaagttccccgccacctgtttctacttggggatggccgatcaaacacataaaacttgggggatagtaggaaaacaccaggccatggctgggtattgaactcagctctgtgcctggggacagggaggggccgagtcaggtaacacctgagacaaatccaaaaggccaggactcacagccacctgggcaccccccaaatctgagttcgaattcccaggctggggtggctaagacagcttgcattttaaaaacctcacccatgatctgttgctcctgccggtaattcctgacaacagaaacgggttagactcagagcctgcagctgaggaagagctctcccccagccccaggccagaacatgcaggaatggcggtaactagagcagccgctccccgagccctcgggtgcactgggcctgccccgcaggtctcaccccattgaaccctcaggggcttcgtgaagtgggtcctgttcatcctccttttacagatgagaaagtggaggcccagccttgctctgggaaccaaacacacaactgacattcagatatagacactgagaagccaggattgtattctgttggggacggtggctttagggccctgactgacagggctccattttttctcaagggggtgctttgtttggtcatgtgcagaggcctgcaatggatcaggacagaagatttaatcttttataaatgcaaaagtggcttccccgccctctcgggggacactagtggacggtggctgcgtggtgccacctgtctgacacccctgtggtgttggccccttcgctccctgctgcttctcccggtgccgctgcctgtgccgtcctaaccagtggggctggctgatacctgtagtcgggcactgggccgagggttgcaagttccacctggatttttccctccacagtgccaagatttgctctcccagacgtcatccccactgagtcagaatgattcctgcactgggcggtcggcagatctgctgctgcctccaggggacacaggcaggaggcgccatgacagtctccatgaccctgcggcaccctcccgagcggagcgcttcaggatccaggtggggcagggggagtggaggtgcagccaggctctacctcattcctctgggtgggacagggcctcccagaaccacctgctgccccatacttgagcacagttgggctggcaccagagtcaggaggcactagcctgctctgctcgcccacacccagccgccttgcgtaaggcccacccagcacccatggtgccgagctcgggccgcacaactcactttagctgtcagctgctggggccactcctgtgtcctgtacttccctccctcaggggttcagatcccctgtccgctctttctctgtggcctcttgcgtcctgcactgcctcccctgctggccccagagccctctgtgctctcctggcctctgagctccttcttggccccttccttctctgcttacccacgttgttccccagaactgctttccctgcagcttcacctcggcagcattctcttcctcctgctcagcaaaaccacagccagaccagattctgttcttcctgttctctgcctgcagccccgtggggggcaccgctggagacgcctcctccgctcccggtgcccgctccagccctggcggaggtgggcccgtctcacactcctggctcaccttctcagggcatcatttccaggggtcctggatttactcaggacctgcctgtcctgcctccctccttgtacggaccttggctttgtcctttgtcctcttcttggcctgtcagacacaggattagcaggtgtccctcaggcccctccgggtgaacttcagcttcacccctgcttgtttctctgactctcacttctcacttctggctctggggacttcctttccctttctacaagcacagccatgagttttaaaggatttttaaacacattgtccagcaattccggttgctgttgagaggctctgcgcactgctgggaagggagggcctccgtgtttcctgaatcttttccttcctctccattccttccaccagtgccctggacagggacccatgatctctcacctggaccgcagtggcctcccccaccccctagctgctgccagaaggatccatttggaatgcattcctaggcacgggcgggtgcttcactggcttccccgctgtgaagatccctcccaggccctgggctgggtcccaaggcgtcccagggtctcgtgggcgctgttctctcctttggtctttgtgcagaacagcctggcagcctgtgccccccacacagactctgccatctcctctctggtcatttcccatctcctttgagactcatctcggacaccacagagactgtccttcccaagccctgctctcaggcggtttgggtccctgctgtgcctctgctgtggctagcacctcccctctcccgcagtgtgtttgaattgctggtctgccccctgccatctccactcgacccttgaacttgctaaggtcactggcatcttcacccttgagtgtgctggagccaggcagcaagcccatgtgctcctctggagcaaggagcaggtgtccaattgcgtgtgtttcgcaggaggagcaccgtgaggccaagctgaccctgcggcccccgagcctggcagccccctacgccccagtgcagagttggcaacaccagccagagaaactcatcttcgagtcctgtggttatgaagccaatgtgagttgctcccaccctcccagcagggccggcctccctgctccttctcggccaggcacctgcggccaagtcccagcagggactccacaaagccaggcccagggcttttgagctgttctccactctcagccactcttgacagctaaggcgaaggggtggaggcctctggatcctttagctagggagttgaatggagggtctctccagctggggcaggagagggggtgttgttattgagaggggtaactacttgattgtgggacagtcccaaattggttgggtcacccctgcatggaaacgcaggatttcctaagcctggccactgctcgcccccacagtatctgggctccatgctgatcaaagatctgcgagggacagaatccacgcaagacgcctgtgccaagatgcgggtagggtgcctgtgtgggctggagggcgctgtgggactggccagcagaaggcagcaatgggggcagtagctgcagttgcctgggccctgctgcactatgtaaggatgggaaggaagctgggacctgtggaagcccaggaggcttagccctgagaaggggcactgacagggccaccccttgtttcctgtagaaatctacggagcacatgaagaagatccccaccatcatcctgtccatcacatacaaaggtgtcaagttcatcgatgcctccaacaaggtgtgctgcttacagggactcttggtgggagtgggacccacatccccgtcagacccacagggctccagggcaagcaacccggctgccctgtctcatctcttatctccctagagggtccccagtcctcttattacttcccactttgctaagaggcgtgtctctcatctgctggcctgggtgcctgctgtcagccccgtccccgccctagtgatcactgctgttagcctcgccacctgggctccactggccgcacacctgctcacaggtgtgattccctccgtgagcaaaggactttctctgtgtgccaccgtgtgggatcccaccttcctgacacccttcccactttgcccccaccctggaaggtgggaggggctggggagagcttgtggttgggtgtgaacattttactgccttagttgttgtggtaaggggtggagaccccaaaccaaaatcggggacccccacccccaccaataaacaaaatgagaagatgaaggggggtttgcttgatgctctaggctgggacagagaacagtgacaatggtaacaggctggggcagggggtgccagaggcatgcctgagcctgagaattccagaacacggctttccccagcagaacgtcattgcagagcacgagatccggaacatttcctgtgcggcccaggacccggaggacctctgtacctttgcctacatcaccaaggacctgcagaccagccaccactattgccatgtgttcagcaccgtggatgtggtgggtggggtcctggggccgggtggggcaggcttgggttgcagccctgaggcgtccagccccattgcagggcacagatgcggcgctgtcctggcccctggccagtgcctggcaaatgtttggttcatgaatggagcccagcagcactcaggccggtcccctttcacagtgatgagactgacgcgcagagggaacagggactggcccagggcactagggacaggaggttccagctttttttttttttttttaagagatggagtctcactatgttgcccaggcttgccttgcactcctgggttcaggcaagttacccacctcagcctcccacgtaactggataataggcgtgagccaccgcccctgactttccagctttttggcgagtgttttcttaggtcaggcaaggcctttgtttcccccggctccctgccctaggtctccaacctctggctgggccgcctcccagaaatgccctctacttccctcttaggggcagtggtgccctctttggcagattttcttccctcaaattcctgctgaggctcggctctggatgccactgggccgaggagagttcattctcacacagctgcccacagggagcagaccagaactgacagcccacaggcgggggttccctctaacctgcaacaaagcatgagagtggccccaggctgcttcctcaccccgggaggaagtcagaggggtccaggtctctgccgccctcagggatagcagctgcttccagaatctctgtggctcctggaatacaggcagctctgggcatccccacactcctgggacctcatccaccccagtcctctgtttgctctgggccagtgaaggttaggaggaaccaggctttgctgcttgctggctgtgtgagcttggaaacatcgcatctgcctgcttcctcatctgtctggaggggatataatgtggcccacctcaggggccactgtgagatggatgaggtggtccacacagcacagtcagtggcatttacctgttgctgacttttcccacatacactcagttctgctgtaacgccacacatacgctcctaacaatcactgtgctgtgtaaaatcacacaaggaaaaccacagggtttatggggaaatggagttaggggcacagcactcacagactttgtcggtgacacattaaaaataaaagcactagcaccacttacattaaatggtaagaaatacccaagtactgctgcaggcacggcaccctgccttggaaaagacctgccgtaggcttacagcagtgtgcacctgccctccccgcagcccagctcccggccacatcctgtgtagagcgggaagaacaacagagacctaggaagagtaaaggagggaaaggagggaagagtggaaggaggtaggagcgctcccgggtagacttagagggggacacatggtccctgcgaggaagggcatatccagtgtgaagcggctcctgaaccaggtgcttaagtggtgatctgcttcctcccagaacctgacctacgagatcatcctgacgctggggcaggccttcgaagtggcctatcagttggccctgcaggcccagaagtccagggcgacgggcgcctctgcagctgagatgattgaaacaaaatcttccaaaccggtgcctaagcctcgggtcggcgtgaggaaatccgcagtacgtgggccccactggccaagatccccctctccctggccccagggattcaagggctcagggtggtcagcgtgaggagggtcttctggcacttccagaaagctggccctccagggaaatgaccctcttaattgtcccccaaccctgccaggtctcgcccctggaaaggcagcagctcctctggcctgggcgggcctctcatgctcctgtttccctccctcgctgggctcccccaagggcaaggccgtcaaggggctgcagagagcggcctgcaggcagcccccagtaactgcgccatccctgtgtctgtgtctgctttgctctgcaccccaggtgccgctgccccccgatagtcgctgttgttactgtcacacctgcaccacccaccgtccttcctacctaccgctgccatctgttagtcctggagtcaaggtctttacgcctcctgctgtcttgtgtgtcagtctccccgaagtgaccgtgagcgctcttagcctctggcggcctctccctctgcctgtgtgacattctttcccctcttcctgagatgccctctgcctgttctgtgtgtgcttcagccctctctgtttttctgttgtgtgtcctctctccagaggtctggggtgactgctgtggtcttgccttggggtgagctctctgggcctaccagagagacccgaggctggacatttgcaagccccatatccccttcctgcccagtgtgagtgggtctggggcttagagcaggaggcccgcctaggacaggggtcctttaactgagcaatcccaagaaatcccggagagaagctgtgcctggaggtggccctccccaagatgctccaggagggtgtccctcctccgcctgcccccaggggcctgctctttggccgaggagaataagggctgcccctcccagcacaggggccacagcctggcctgggggtgggaggggcctgctgcctccagccctggcacagagctccctctgactcttgactgcttccttgtttggcagctggaaccacctgatatggaccaagatgcccaatcccatgccagtgtctcctgggttgtggaccccaaaccagactctaagcggagcctcagcaccaagtatgagaccactatcttctaaaacaacccactccctgtctccactagtctcactgtgcctttgccatccgatctttctgctgtcctcaactctctccttccagctgctgatgccaaggccccacctgcactgggacctgctcctcttgggcgggcggcagcgtagacgctgtacacttgcagctctcgcacctaccaccaccgaacactgtgaattctcccccttgggctgaggacagcttgagggggtgagttgcctttgaggtgggcatcaagagggctcaggggttctgttgcaccctggaagcctccacgggcaggcactgtgaaccccgacgggcagggcagtctccagcaggatcccaacggcactgatagctccccagggttgggctgggctctgtgtggctccctcctcctgtctgctgtactgagccacagctgggcaccgttgccaagagctagctgactgttctcacctctcctgaaccaaccaaccactgtgaccacccagtgccagagtccccagcactctgctcacagccggcctgcagccccaccccactgtcctccgctactccgaggtgctggcctcactctcatggctaggcccttgtgagaccttgagctcagtgatgtggctggaccagggacagactgctttctgtgagggcccaagatatgcgccaggcccttgggtccgtgctgactgccccacttggggctctgggtatctgaacactcacaggctggctcacacagcaggtgtctcagtcctgatgggccttcccctccaaggaggtgggtggcatgtgtgtggacagcccctctatcttcgccatggagtctcaaggcctggcagccttgggcctggctctggagtctagctcactgaggaggaaggccttccgtagaaccaacgaggaggcggcctgtgccctgcacacacggcgcaccttcttccctcacagaacagagctgctggaggacagggacctggaccaagtggcctccattgtcctctgggagctttctgacactctccacggtgggggatcacagatagacagcgccgtccagcatgcccctgaccacctccctcagcctcctgactcctccgaaaggagaggccgtcccatcgcagcagctcagaagctgggatggtggagctgagtctttgaagaggcaccccattctccagtgtgggcaaatcagtttggatggcaggagacaggaaggaagcggcgcccataggcagccgtgcacacatagcagagtccactaggaaagccagtcggccagggcagtcaaaacccaagtcgataaactgggtgggtcctgcgtacccacccatccttgtgccttcctgagcagagtcactgagccagaggcagtgggggctgcaggctgtgggtgctcaaagcaggcatggagggtgccccggggaggctgtgagggatcgtctgtcctgctctgtgtttcctttccatttcctccaccgtccgcaggccccattggttaaccctttcctccccccattgtttgcttctgccaagctgagccactgaggaaccacactgtgctgcggaaacatagacgtgggggcataggctcccactgccaccaccgccatcgcctcacctgcagctctgaagacccaggcctcacctccgcctgcaggacctcctcttggccacttggcctgggcctgccaccaccacgtcctgcagaacgagccctgccttggctgtggagaagcactccaggccgctagcagatgggactggcattccagagggtcaagaagtgacttgttcagaacacattgtttttaacagaaaaaaaatctttttataaaatgaacttttaacacttggctcaaacctctaggtcatactgccaatctttagacaaatggccatggggcagaggacaggggagctgaggttggttcagaggccagcctgcatagcctctgtcctcaggacggaacttgggtgcagctcagtgggtcggaagagaaggcggtggcctgtgggtgaggggaacggagcaggctcaggcagaattgagtacggtgcgtctgcttttcaaacccaaccatatcagctgctgctctttatgaactgcccaacttcctgtccctttcaggggctagacacaggcttctcgtaagaacacagccttagaggcacctgagcaactcaaaggtttccggtccatttctggggttcccgatgggaaggttcagtggccaaatgaagataagtgtgcagtttctagtgctgggaagtcttagccagcaccagagcgccaggcctctccctggcctcttacctgtcagtgatcggagcactgccctgggctggccggcgccgtactgcctgcgttgtgtcagagaataggaaaagcagctttgtttggggcattaatgcttggagtggggtcagctaaggttgctacttgccaatttgtgatttgtctaatcagcctgtgtgattggggctcattttgattctctgaattatcggtttgacggttacacttggctgctgggcccatccctggcccccggtgtggaaaaggctaaataaggtgacagtgcatcgatgctcccccgcgtggcctttggggcaggctggcatcccggtgcgcctctgcttcttaagctttcctgctgctcgctttgtttttaaaagtaacttgggttgcattcttccctctggactagagtagaaatgcaggggaaactgctgtggatttgagaggcaaagttggctcagctgtgtgcccagttcctcctgtgggcactttagcaggctccgagctttcctggcataggtcaatcaggtcccaggatgaataatccaggcttcagcaacactcctctttcccagccagcaaaggctgtgaatttgaattctttgttggtatgtatgtgcagggagtactgttaggcacattcttaacccatgtggttggccagaaatcagaagtggggctgtgtctctgactggctagaggccaggccttgtgggtttctatctgctaagcacccagcaggttggggcctgggactcagctctctctgcggtagaggcaggccctcctccacttcttggtactaaacgaagatctcgacaccttgcagttttacttcatttcctgcccctttcagggcctgtgaggatgcccatgagctaccgctgtacagttctcggccccggctttcttccaagagttgaccaggaaccctaaagcatccagagtagactgcgctgccactgcgcacatgctggtgcccgtcttcctcctaaggggccaggccacatccaagtgggcctctgtcgggggcggggcggtaggtccgaaagaaaccgcagacactacgatgcactcctcaagctgtcttttgtgcttagatcatccataggtgtttcttctgcttgaagctgctatatcatctttatttattcagggtattttcatattggaagccttggctagtctgctctagctctgggttctgtttagagattggtttatttctgaatattcaagaaaggaaaatgactgggcctttctttcttttcttctcctctgggatgggtagtctccctttcctagaaaggttattataactttaaggacaggcttcaagtgggaaggcccctacttttgcacttctccaagtgcaggtcacaccaggggcagaccctgtcgctgcgtttctgaactgtgaaggagcccattcgggtgggagacttcagatgggctcagtacctgtcccagccacaggcttcttgtccacctcttctcccctgcccaccagctgctcagcgcataagaccttcccgacaggctctgcgtgtgcagctctctgcgtccctcctgggccctccagcgtcagacactaatgggagttcccgagatgctcgggtttgagcagggagcaggcagagctgcagtcagagacattagaaaaccagtctgaattgggtctgtctttgagatgcccaggccagcagaaagcagctcagaagtattgttgctcatggtgtggcaatggactgaactgtaatgaaaatgttatttaatctttgtctctgtattttgatacttgaatgactttcccttttgttttactgtatataaaattgttaatctgtctgattttgtctgaattataaacactttgaggtaccaaacataaccaatctgtgcaacaacatagactgacctcagtacccaagagagtgtaaatatttctgggcttccagctttggttttgttattttcataactgtacacaacttagaacagactgaattaataaatgagaagcgacatgaacgcagccttaattcttctgagtctttgaattggaaagcgtcttgatggttttctggcagaggcgtgggcacaggcgagacgcaggctcaggatcagtgattcgcatcctacaccgtttggctgagatgacgacagcttggctgtttggctttctgtctcgcactctctaacaaacagttagttacagctgtgctgtgaggcgcaagggccccaggattcaccttcccctccttaggaacatcgttctgtgaacaccaagccagggccacattctagttactgctgcagtggcatctcttctgcctcttggtctgggcttgtccacccatagacatgaaccgaacatctgcctcccaggcagcctgggggatctagagctgtgaaagaaagtgctctcctttcaggaacttgcttggattgcagaggttaagttttagacataaacaactagctaccagcccgaagccgtgctatggtagggatgcagagggcaaagtgttcccagagggctggtggcagggagaggaaggggcagggtgctgagctgtatttaaaggggagaatttgggaaagcacaagcaagcggtcatagcggccccttcactgattgacggagcaccttggccccttcactgatggagcacctgtgttccagctctgctagctttccaggcaaccatctcattagccccactcctttccggacaggtgttgtcacctctattcataaagcagggcccagggcctctattcataaagcgggagggaccttgagccccatctggtccagtggctccagctgccagagcccctgttcctaggcctgtttcaaccccagctgcctagcactgaacgcttttattcctgagtttctgtggacgcttccgtttcttaaaagggccttaaaaaagaaaattcacttatctagttcagtacccatattgaacataaacaatagttgtttatgtctaaaacttaacctcttttattggtagagaaaacaaggtccagacttggaaaatgattctctcctagccagcctgccagcgaatggcagagagccaaatcccaggttgtaactcccaactagggctttgtaggccacactgcgttgagttgggaaagtccactgaggcccagtgggggaggcctcacattccagaggggttcttcatccccacatcccttggctccctggctatggcgctctttcctaagcagaagaaacctgacagccagaagagaaaggtcaggtcataactagtgtcatcagggcaccaggacacatagctgctatcatcatcccttctgggaccaccttacacattctgcctctgtgtgaggcacaatccctggcctcttccactcattcctttctcccccttcaggggctcatttctgtcatactcctccacatcctcatgagcctccccttcacagatgctcaggctcctagacagctgggttgttactactgaaaattgggatagatcaatcctcagcaatgaccaggccacggaggaggaactttcaagctggagcactttccaaggcagctcaaaacaccctctagtcagccatggccacccctgacttcctgaacccagagggtatccaagtcccataaatagggacaggccgactatctagtgtgtcatgcagttcagcctggggctcacactgcacccactgtcatcaactaacaacaaggaaagctaaagtctgaaccatcccttcctccgtgcagcctctacgactttgagaccgcttttttcaggattcggctgttaggaacactattataaacaactatttaccaaatagaattttcctaacaccataaaatatttattactcagtaaatggagctgggacaattgggcagccaaggaggagggagtgcagggagattcctgttccaacttatgccaaaataaattccagatggctcacatatttaaatgtaaaaacaaaaaaacaaacaaaactcaaagctagaagaaaatgggaggcttttttttaataagcgtggtttgagaaaggcctttccaaacgttataaaaccctgaatccattttttaaaaaggattaatatatttgagtctataaaaactaaacatttctgcatagcaaaatgcacctttgagaaaaagaaacaatggaaaactaacatgtgcaccacatgtaacaaggacaccttgacaacagctatcaaaagtaaactaacgcctatgtctcggaagatcagtagatgctcttttccctgctcttcccactaagtacgattaaaacccccagtggaaacaccagtgggcacagacaaaaacctgttcttcccagccagaggaccaggaaaggggcagcttagcaagacagaaaatttagacaataaataactgctctactccagccaagcaccacaggaaaaatggggccccacccagatcagcaaaggccaagacctctgccctcacaaagctataatgaggtgcccaacaacctcacgcatgttgtcagagggggcctggtgaagagacagaacgctcaccagcgcccagtgattgtgatgctgctcccgccttgggagtcagtggaaactacaggggcagccgggagtgccacggcaccccagcagtaacaagcagcctcccacctcaggtgtcagtggaggccaggtggggaagctgggctttgacccccaacctggcagtagtatgctatttccttttcccttgctagagtggtgtcaaagtcagctaaaagagaaggtttaaataagaatgagaaacagaaatgtccaagtttcaatagaaaatcacttatcataccaatatccagaaaactctcaatctgaatttaaaaggcagtaatcaatagatatcaacacttagccagacatggtggcacaaacctgtagtcccagctactcggaagcctgaggcaggagaatggcttgagcctggggaggcagaggttgcaatgagccgagattgcgtcactgcactctagcctgggcaaaagagtgagacttcgtctggaaaaaaaaaaaaaaaagatatcagcaccaagatggacagatattagaattatctgacaaatattttaaagcagccataagaaagtttcaacaaataattataaacacacttgtagcaaaagaaaaagtcaaatgtctgagcaaagaaataaaagatataaagaacctattggaaattctagaactaaaaaaatacaataaccaaaatcagtggatgggcttaagagtggagtggatgggaaaggaaagaatgcaccataaactgggaaacaaaacaacagaaattacccaatctgaacaacagagagaaaacagattgaaaaaaatgaacagcatctcagggacctgtgtgaccataacaaaagatctaacattgtgtcaacgaagaagagggaaaaagaggctaagaaaatactcgaggccgggtattgtggctcatgtctgtaatcctaactctttggaaggcgaagtgggagaattgcttgagtccaggagctcaagaccagcctgggcaacatagtgggaccctgtctctacagaaaaactttaaaattagctgggcgtgatggtgtgtgcctgtagtcccaactactctggaggctgaggtggcagaattgcttgagcccaggaggtcgaggctgcagtgacctgtgatcacaccactgcactccagcctgggcaacagagtgagacccccatctcaaaaaaaaaaaaaaaaaaagcactgaaaaaaataatgcctgagaacttccaaaatttggcaacaaacataagccttcagattcaagaagccaagcaaatcccaaaccagataaactctgcgaaagtggttagaattaaaagtcatttctggccgggcatggtgactcatgcctataatcccagcactttgggaggctgagacaggtggatcacgtgaggccaagagttcgagaccagcctggccaacatgataaaagcccaaaaaatgagccagacatggcggtgcatgcctataatcccagctactcaggaggctgaggcaggataattgcttgaacccaggaggtggaggttgcagtgagccaagattgcgccactgcactccagcctgggcaacagagggagactgtgtcacaaaaaaaaaaaaaaaaaaaggaaagacgaaagaaagagagaaagaaagagagaaacaacaaaaaacaacaaaaaaaacagtcacttttgtgttaaaaaaaaaaaaaaagctggagagacagttctcatgcataaatgcctggtaacaaaaactattattacaaaagaccacaaccttttgaaaactagaacctagcacaaagaccatcacaaccttataccaaaaaaatacttctgcaaggacatctgctcagcaactgactgtccaaccccaaactggccccaccgttgttattgatccttgtagccaaggataattatctcaaaacaattatgtaatcctcatttttcctttgaaaacctctgtcttccttcaggtccctgaatatgcacatggtttactatcacacatgtattcccattgcaataccttattaccaaataaatatcattttcttttattagagggcctcactccatttgttattgagattgacataaatgttgtcagaagtgggatgaggcaggctcacttcagaagaatcagaggcccctgaaactgagtgtattctgactgagccctttgtgctctccatcttcatgagttgccttttccagccaggtgaatctcctgtaggattctcagactccctctctttggtgagttgtttttcactttatagaggatttgtttcagttacaagtctgtctttaataaaggacactacatccctccctcctgggatgataaaagactttttgtcctttctggaaagtcctttctgggatgaggacaagggcccttctggtttgagtgctctggtttctacagaatttatatcctatctgtgaggcaagtcttttctggagaatttacttttggttcttcctgcatgcctaatttaatagtgtgtttaatctgcacacctgggttaaaagtattgtgaacactaattttggtctcattttggtttggttatgcgtgtctgtaaatgatttggcccttttcctttgctgatttctggaaattctccaagagcaaaaataaacattccaaatggcagacactagtggatgactaattaaaagccatgagggcagttgccatgatctaaaataccagtccagacgcctgacattctctggtggatttacaggattatctttgctcttgagagattaataagaaatggaatgggattcacaaacgctaaggcatgccaggttttctgaggctccagccagctatataatatggcccattcttatgcatattttttaactgatgggcaaattacgtgaaggaaaattcagagctcaatggtcattagtcaaaccctctaaaaaagaaaaaaaaaacacacacaaaccctccaactacaatgttaacatatggatccttctaagatctctactttgaatctgctaacttttctgctggtgttgagataacactctcttctaatggcattccagccaatttttttttttttatcttaaaggtctttcaaattaatggctttacaaattacaacagcttcatggcagccaacaacctagacaccttttgtaaatgtaaatttaggtttgtctaacaaccacttaaggtgatagaacagttaattgaaggattaatagtctacaagaaaaagaactaggtaaatgcttataaaagttaggttctcagggccaggtttaatcccagcactttgggaggccgaggcagacagctcacttgaggtctggagtttgagaccaacctggccaacatggtgaaaccctatctctactaaaaatacagaaattaaccgggcatggtggcaggtgcctgtaatcccagctacttgggaggctgaggcgggagaatcgcttgaacccaggaggcagagattacagtgatctgagatcatgccactgcactccagcctgggtgacacagccagactccgtctcaaaaaaaaaaaaattgggcttctagaccaaacaggtgacaatcattagctcagagtaataatataaggtttctctgtccagcataaaaactgcttaagtctgacacaaggcaccagaaaaagccaaaagaaaaaaaaaaaaaaaaaaaaacacatacacacacacacacagccaaaatgcttgcccatccacgttgattattcaagtaaaccagaccagcaaacaaaagataaatttgctgctaattcaaggccacttggagactgttcttcttatacagttcagttggtcttagttaaaatgcaaacactgaagagttacccccaaactctttgaaacagaaaaaaggaaaaggatgaagagattttaaaaagctaaactgtttacgaaaattttgttccacagctttcactggattagttattggagcaaaatttagccatgtgaacaggtcccattttgtcagaagcgtaagttggatgcaaccatcttttataaactggtgagtttgtattactctctcatgactaaaattttaaaatgaaagctataagatttgtgtgcgtgtgtaagcatctggtgtatttatgcatatatacatgtattatatatgttgtgtctacatggtaaaatctgacataatcagccagaaatccctgagggaattctattcagattagcttagataaatgagcactcatagaaaatatatagtaattaacccaaatgccttttagaagtaaatctttaataaataagctagtttttaaattattggtaacataaaaatagaaatgtcttcaaaatagtcggtatgcatttttggctgcatgctggtctcttagatattaaactgtaaattcagcttaaaaacagaataatctttgtgtaaccctttggtaaataaggctaatttaatattgttggtttcataaaatcagctgtatctcctgtgttatcaacaaaatacccatatatttaaatttcttaggtgaacacttgatattcagaggctataaaaatggttaacagagaaataacttgaaatgatgacaagctttgtctaatacctcagttttcataagtaatctaggtaaactgttaaacataaatacatcatgtaaatataaagaggaaaaacatttatacatgaacttttcatgtaatttaaaatcttttaaagtgtatttatttttattttttatttaatgtggcatcttactatgtagccaggctgttcacaaactcctgggctcaagcaatcctcctgcctcagcctcccaaatagctgggattacaggtgtgtgccaccacacctggctaattggaaatctaaaattatgcttaattcaattaaatgatagatgttcattaaatgtctgggtcatttccaaataagataaaaaactgaaacaaatgactgaacataaatatttttgttcctgcttcttaaattttatagaaagattaaatatattttggcccgttagtacacattaaaaattatggggaaacatgtttctaaaaattataaaatggttttttctctttgagaaaaaaagaataattttgtctaatttggagattatttaaaggtaatttcaaaaagtaaatttagaaaggaactagaaacaaggtagaaaggaatcggtaactaggggagagagatatgaagaaagttataggtatgaagagtatttttcgtaagtaagttaaaaagaataattttgtatgagaaagaatcttgggccaggtgcagtggctctcgtctgtaatcccagcactttgggaggccaaggtgagtggatcgcttcagcttggaagtttgaaaccagcctgggtgacatggcgaaaccccatctgtataaaaaaattacaaaaattacctgggcatggtggtgcacacctgtagtcccagccactcagggaactaaggtgggaggatcacttgagcccaggaggcagaggttgcagtgagccaaaattgtgccattgtactccagcttaggtgacagagtgagaccctgtctcaaaaaaaaaaataaaaataaataaaatctaaagattttatgttttaccaagataaattcctatactgtctttaataggttttttttattacttaagaaaactgagctttgaaaggattgtttttacatccatataattttctctatttcttctgaagtcttgattaccactgtggttaaacgcatgactattatttcactgtgccatatgatcctgttttgatcaagtgctttatatcttttggcatctttgatgggcttccccaatatcaaaattctaacttaagtctttttaagctagatttaactttgggattttccaattgggccccagagaaggtaaaagaatgttagagctactaaaattaggattatttagaaaatggtttgggaaaccttgtcaaatagtaagtgaggcaagatcttcttttagttacatgaatggataagttattgataagaatcttccaaaattgtataaaactcttagaaatctaatttatcagtcataaatctggttattatgtcataagccagaacatagccaaatttccttgtcaattgctgattataaccaatttccatccaatttttaatcatgattattctaagtctctgtcatcaacagttttgattttttctaaagatatctgcaatcagattcacagaaaagactgtaacaaaactcttcagtctaggttactaataactataagatcaagactaaataaaattttttcagaactctaatgaagagacttgaattcatgaaactgctaatcaagatcaagcagaaaaaaattaattacataagattaagtaacactgatgatggtaatgttttggttacattttttattttttttcccccaagagtcccgctctgtcgatcaggctggagtgcagtggcgtgatctgagctcactgcaacctccacctcccaggtcaagtgattctcctgctcagcctcccaagtagctgggattacaggcacgtgccaccacgcctggctaatttttgtatttttattagagacggggtttcaccatgttggtcaggctggtctcaaactcctgaccttgggtgatccacctgcctcaacctcccaaagtgctgggattacaggtatgagccactgcacctggactttcttgttacttttatgtaaaatattattggttctttccttaaatgtttcattttcaagtttaaggaaattttttctctttagagtttggtaaaatatacttttgtgaagaaacatggaagaattttcttttcttccctacttgattcctccaaaatttagaaactacttgggagtattcttatttttttatggcaacatggttatgcacataagttcaataaaaatttgctcttttttttatagagtgcgattgaaaatattggttatattaccaaggctctgactggaacgtcgtatttgagaacatagaatgcccttcaagggttcccagcctgatagtttcgttttgtttttgagacggagtttcactcttgttgtccaggctggagtgcaatggtgcggtgtcggctcactacaacctccgtctcctgggttcaagcgattctcctgcctcagcctcctgagtagctggcattacaggcatgtgccaccacgcctggctagtttttgtatttttagtggagatggggtttcaccatgttggtcaggctggtctcgaactcctgacctcaggtgatccacccacctcggctcccaaagtgctgggattacaggcatgagccactgtgcccagcctccagcctgatagttaatgagtaaaaattgtcactttctagcaggcccaagaactttaaggctataggtaaaatgtaaaatcttccttgatttggcttagcctcaaaaggtttctaaatctgaaattcctatgtgatcaatgtagaaagaaaaagttacgtttctaaagaaatgctacagccaggcactgtggctcatgcttgtaattcagcactttgggaggctgaggcagatggattgcttgagcccaggagttcaagaccagtctgggcaacatggcaaaacctcatctctacaaaaatacaaaaaattagctgggtgtggtggtgcgtgcctgtagtcccagctattcaggaggcagaggtgggaggatcactgagcccaggtggctgaggctgcagtgagctatgatcgcaccactgcactccagcctgggtgacgaagtaagatcctgtctcaaaaaagaaaaggccacgggtggtggctcacgcctgtaatcccagcactttgggaggcaaaggcggacagatcacgaggtcaggagatctagaccatcctggctaacacggtgaaaccctgtctctactaaaaaatacaaaaaattggccaggcgaggtggctcacaccttaatcccagcactttgggaggccaaggtgggaggatcacgaggtcaggagttcgagaccagcctggccaacatggtgaaacttcatctctactaaaaatacaaaaattaccctggtgtggtggctggtgcctgtaatcccagctactcggggtgctgaggcaggagagtcacttgaaaccagaaggcagaggttgcagtgagcagagatcgcaccactgcacttcagcctgggaaaaagagcaaaactccgtctcaaaaaaaaaaaaaaaaatagctgggcgtggtggcgatcacctgtagtcccagctacttgggaggctgaggcagaagaattgcttcttctggaggcggaggttgcagtgagccaagatcacaccactgcacttccgcctgggcaacagagcaagactccatctcaagagaaaaaaaagaaaaaaaaatgctgcaacatacctgttgttagattctagctctatgcattgttttcaagttcttattttctacctataatctagactagatcctaaacctaaattcttcctgattcttccaatctaactttcttccatggaattaaaaaaaaattaattattaaaaattcttccagctactctaccattctattcttaaagccctatgagctgaaactagattaattttaagaaacaaatgtcatgccagatttataggccacaaaaaaagttcagcaaaccacctgatgccataaccaaagacattcaaactacaagctgagatgagaagttgacgttctcacactatagacagcttttccataagattcagtatcatgagacgcttaccctcttactgcctgccattttcacttgacaggataatggtcatttgatttacacaactggttgcctttttaagcctggtttaatggctcaaaaccattatgcaaactgagattgtcattactatgaattttactttgtattttccctttttaaactgtgtatctgttatgttacttgtcaaatttttgcagaagtacaactcctaacataatatgcttctaaccagaaatgctggtccagcactttgagatgatagcaagactacaggaacagacaaattgaacttaataatggactccaggtagacttaatctgacaaccactccctcaaacctcccttgttgctcaaatgtggctaaaaaggttttgacacttactcctacttgccaaaactccttctaatgcagaaccaaaccagtaacctgggacaggttcatcctggcactgagggacatcaaaatctaactacagaatgattgatcactgatgcttttagagaaagaatttgatcaaaagggagaaatgtgaaagttatcagaattaaaatggagttacttatgtttaaaaaaaaaaaaaaactctgaaaaatagagccaaggtaggccatgaagagaagggtcatacataaatacctgataacaaaaactattacaaaagactgcaaaaaccacgttacacaaaagccatcacaaccacacaaaaaatacttctgtgaggacatctgctcaacaactgactgtccaaccttgaactggcacacccttgttattgacccttgtagccaaggataattttttttttattttttatttcttttccttttgagacagggtctctccctgtctccagtctggagtgcaatgctgtgatcatatctcactgcaacctcaaactcctgggctcaagcaatcctcccaccttagcctcccaagtagctaggagtacaggtacatgccaccatgccccactaatttatttttatttttgtagagatgggttctcaccacattgtccagggtggtctagaactcctgggctcaagtgatccttttgcctcagcctcccaaagtgcagggattacaagcatgagccaccacacttggctaggataattatcttaaaaggattttataatcctcatttttttctttagaaacctttttcttcctttaatatgcacatagtttactatcgcatgcatattctcattgtaatgccctattcctgaatgaatatcatttccttttagagcacctctattatttaggttgacaacccaaagaaattcacaccaagatacctcaaaattaaatttctgaaaatgaaagacaaaaaaaaaaaaaattcatggaagcagctagagaaaaatgacaccttacctatatgggaaaagcaatttgaatgaccggatttctcctcagaaaccgtggaggccagaagaaattagcacaatatttttcaggtgctgaaagaaaaagcctatagcctgcaaaaatattctttaggaaggaaggggaatcaagacattcgcagatgaaggaaaactaaggaacttcgtcaggagcagatctaccctaaaacattggtgaaaaaaattttgggtttttttttttttttttttttgagagagagagagacagtttcactctgttgcccaggctggaatgaagtggcatgatcttcggtcactgcaacctgtacctcctgggttcaagtgattcttgtgccttagcctcctgagtagctggaactactggcacgcaccaccacgcccagctaatttttgtattattagtagagacagggtttcaccatgttggccaggctggtctcgagctcctgacctcaagtgatccacccacctcagcctcccaaagtgctgggattacaggcgtgagccaccatgcccagtggtgaaaaagaaggaatggaaatgataaaagaaggaaacttggaacatcaggaaggatgaatgaacatttaagcaaaaatatgggtaaatacactagactctccttctctagagttttctaaatgatgcttgatggttgaagcaaaaatcataacactgtctaatgtggttctaaatgtatgtaaaggaaatatttaagacaattttactttaagcggagagggtaacgtgatataaagggacatacagggaggtacggcttctatgctttcctcaattggtaaatggtgacaccaatagactttgacaagttttatgtgtgtatataaatatccaagacagccactaaaaagttatgcaaagagatatactcaaacactgtctaggtaaatcaaaattggtttttaaaaattggtcaggtaactcacaaagaagcaggcaaaagaataaaaaacaggataactagaaaataatataaaatggcacacttaagccccaatatatcataattatattaaatgtaaatggtataaaacaccaattaaaagagattgaggccgggtgcagaggctcatgcctgtaatgttagcactttgggaggctgaggtgggcagatcgcttgaggtcaggagttcaaggccagcctggccaacatgttgaaaccctatctctactaagtatacaaaagttagctgggtgtggtggtgcgtgcctgtaatcccaactactgaggaggctgaggcatgagaattgcttgaacctgggaggtggaggttccagtgagctgaggttgcaccactgcactccagcccaggcaacagagtgagaccgtgtctcaaaaataaataaagagattgacagagtagattaaaaagcatgaaccaactatatgatgtctataagaaactcacctcaaataacaatataggcaagttgaaagtaaaaagatagatatattatgcaaacattaatcaaaggaaagcaagaggaactttattatttttggggagacaaggtctcattctgtcacccaggctagagtgcagtggcacaatcacagctcactgcagcggcacaatcacagctcactgcagcctcaaattcctgggctcaagcaatcctccagccttggcctccccaaatgttgggattacaggtgtgagacaccatgcccagccaggagtgactatattaacagctcataaagtacacttcacagcagagaaaactacaagagacaacgagcattatataatgataaaagggtcaatgaatcaagaagacatagcaatcctaaatgtgtatgcactaaacaaaagagctgcaaaacatgtgaaggaaaaactgactgaactgagaaatgtaaacaagtctacaaatgtcatggactgaactgtatccctcccaaattcatatgttgaagccctaacctccaatatgactatacttggagatgaggtttttaggaagtaattaagtgtggggggatcggtcagagtggtgggaaaaactatagggaaaggacgcaaaccttctgaaaggtcagaaggttttgcagagccccaggggagactagctgaagacagctgttctatatgagcattttcataagccaattgcaacaatatcagtggcctgggcatgactaatttgtctcttaattgcctgggttaaccgactgataaattcaacaaatggctcctgaggcccttgtcgaacatttacaaaagatccctgttgaactctgccttcgggaattcggtcccaagccctgcaggtgcataaggacacttgtacatatgcttgggggacaatgtaattgttattgtacattgacatagggacccctcccctggagcatagcagcctcgttatgttttgcccagccaattgattctggttggcttgttcttcacacaactcatcatattctgccctccagtggaggtattgactggcctctaaagttgttttagctagcactgataagtcccatggggtcatatggaagttacctgctatggcctcaattaatcctttcatacgtgggctagcactccgttttctctaatgctttttcttgtttccttgtaagtgttgaaagtaatgggttcatgtacctgattgccttgttgatcttgcatcaccaggcaggccaagagctccccttctaatgccacttgcctaagacagggtgccataactgtagtgtatctcttgtcttttttccaatttattgggggagggggctcagggaaaatctctgtggcacctttacccggtaatggcggggctgagggacgaggaggaggtggtaaggtagatgatggttcttcctccctttcctttttaggttcttctgtgtagagcggagccaaagcagccctaaggcccataacgttaaagatgttactggtacccattgcccttgcacatgatgtcgtttaagatttcttcccacttgttcccagagctctaggtctagtgtgccttcttctgggaaaacaagtttgtattaggtcccttaactgggcctccgagaccaaggctctactttaagcagctgtttcaatacttttatatactgttgctgttgagcttataactgttgtcccatgatgaaaccctagcttgaaaatcccctcaaacttggaaatccccagcaggcaccaattacttactgcgcagtcacttcacttttgttttcaagggttctgtcgcgatccattgcagcgttcctcacgtggggcaccacctgccaggtctgtcccgcagaccctggccgatggatgaaatgagtcctcagacacaggtatgcagtgtaaaagcagctaggtgactgcttggctctagtggctacagagcagccccaagaagctggagctgctcttttttttgtttgtttgttttttgagacagagtctcgcactgtctcctgagctggaatgcaatgacatgatctcggctcactgcaacctccgcctcccgggttcaagtgactcttccacctcagcctcccgagtagctgggattacaggcatgtgccatcacacccagccaatttttttgtatttttggtagagacggggtttcaccgtgttagccaggatgacctcaatctcctgacctcatgatctgcctgccttggcctcccaaagtgctgggactacaggcgtgagccaccacacccagccctggagctgtttgcttttattcagtgcaggcacaatgccaaaaacctggagccaacacaacctgcagataattaacatttattgttcccctttcagggaacactcacagatgataaaaggtcagttcctggtcaacaagcctatttaagataaactccccccactcccttgtacctactccttgccctctgcctcagggttatctataacagctgccttcagctattctcccccagggctctgcagaaccttccgacctttcagaaggtctgcgtcctttccctatagtttttgccaccactctgacagatcccctatacttaaggttaaatgaagtcataaggatagggtccttacccgataggattggtggccttatagaagagaaagagttttctctctctttcccctcacacacgtgcatatgcattacagaaaggccatgtgttgacatagaagaaagcaaccatctgcaagccatgaagaggaccctcaccagcaactgaccctgccaaaccttcatcagggagttagttagcagcctccagaattgtgagaaatacatttctgttgtcaaaaccacccagttcatggtattttgttacagcagcctgagcagactaatacaacaaacatagttgaagatgtcaacacacctctctcagcaatcaatagaacaactagacagaaaataagtaaggagatagaaaaattcaacaccaccaccaaccaacaggatctcattgacatttatagaacaatctagccaacaacagcagaacacatggtcattttaagtgcccatggaacatacactaaggtcatttcctgggccataaaactaacctcgacaaatttagaagaattaaaatcatacactagccaggtgtggtggctcacacctgtaatcccagaactttgggaggccaagatgggtggatcatttgaggtcaggagttcgagagcagcttggccaacatggtgaaaccctatttctactaaaaatacaaaaaaaaaaaaaaaatagttgggtgtgcccagctactcaggaggctgaggcaggagaatcgcttgaacctgggaggcagagttgcagtgagccgagattgtgccactgtactccagcctgggcaacagagcaagactccatctcaaaaaaaaaaaaaaaagaattaaaataatatacagtgtgttcttcgaccacagtagggtcaaagtagaaatcaatagcaattaagataggaaattctctaaacacttggaaataacacacttctaaataatccgtgggtcaaagagccaatctcacgggaaataaaaatatacattaaaatgaatgaaaataaaatatttcaaaatttgtaggacaaggcaaagcagcactgagagggacatttatagcactaaatgcaaacattagaaaagagaaaaagcctcaaatcaataatctaagctcctctcccaagaatcttgaaaaagaagtgcaaataaaaataaattcaaaataagcagaaggaaggaaaaataaagataaaatcataaatcagtgaaatggaaaacagaaaacaatagaaaaaaatcaatgagccgggcgtggtggctgccacctgcaatcccagcactttgggaggctgaggtgggcggatcacttgaggtcaggagtttgagaccagcctggccaacatggtgaaaccccatctctactaaaaatacaaaaattagctgggcatagtggtgcacacctgtaatcccagctactcaggaggctgaggcaacagaattgcttgaacccaggaggcggaggttgcagtgagccgagatcgtgccactgcactccagcctggggtgacagagcaagactccatctcaaaaaaaaaaaaaaaagacaacaatgaaacaaagagctgtttttttgttgtcttttattttattttttattttttgagacagagtcttactctgtcacccaggctgagtgcagtggtgcaatctcggctcactgcaacctctgcctcccaggctgaagcgattcttctgcctcagcctcctgagtagctgggattacaggcgcgtgccaccacgcccgactaattattattattttttgtacttttagtagagacgggctttcaccacattggtcaggctagtcttgaactcctgacctcgtgatccacctgcctctgcctcccaaagtgctgggattacaggcatgagccaccacgcccagccaagagctggttttgtatatataaatatcaataaaatttagaaacctatagccaaactgacccaaaaaacgagagaaaacatagatgaccaatatcaaaatcaaatgggctatcactattgaccctgcaaacatcaaaagaataatcagagaatactatgcagagtttgtcatatataaatgggacaacttagaccaaatagatcaactcctcgaaaaacacactgtcacaactcaaccagtgtgaaacagatcattcaagccttataagtgttgaatctataattctattttttatcttattttatattctgagacaggttctctgtcgcccaggcactgcagcctcgacctcccaggctcaagctaccctcctatctcagcctcctggatagctaggaccacaggcatgcaccaccatacccggccaatttttaaattttttgtaaaaacaggtctcaatatgttgcacaggctggtctcaaactcctgggctcaaatgatcctcctgccttggcctcccaaagtgctgagattacaggcatgagctgccatgctggcctgaatccataattaaaaaaaaaacaaatctctaagttgaggtaatttcaccagagaattctatcaaatgtttaaagaattaaaaccaattccatgcaatctgttttggaaaacagaagggaatgcttcctgattcatttattctatgaggttgacataaccctgataccaaaaccagacaaaggaaatagaaaaaagaaaattacaaaccaacacccctcaagtatataggcaccaaaaaaatccttaacaaaatattggcaaatagaatttgtgtatgtgcatgtgtgtgtatgtgtgtaggattatacatcatgaccaagtagagtttgttccagggctgtgaggctggtcactatttgaagctcaatcaatgtaatccaacatatagtctaataaactaaagaagaataaaaatatatcaattgaggcagaaaaaagtttgacaaaattcaacacctgtttgataaaaactctcagaaaaatggaaatagaggatgaacaatagctccccaaatgtatccacatcctaatgaacggaacctgtgaatatgttaccttatatgaaatggtactttgcagatgtgattaaatcaaagatcttgagatggagggtttgccctgtctggaagagcctgatgtagtcacaaaggctactaaaagagagaagtgatgatgacagcaaaggttgtagtgatgtgctttgaacatggaggaaagggctacaagccaaggaataaggtgtgccctaaatccaattgcaagtattcttataagaggcagagggagatttggtatacacagaaaagaaccatatgatttccatgtaaccatggaggcaaagattggcataatggggccacatgtcaaggaatgtcagcagctaccagaagctggaagaggcaagaaacagattcttccctagagcatccagtggacatatggtcctgccaacaccttgattttagcctgatgaagctgatttatggactctagaactgtgaaataatatattactgttgttttaagctacctaacttgtgatgatttgttacacaagccaaaggaaacaattatgtccatccctagagccccaagaaggaattcagctctgtatattaattttagcccatgaaacacatttcagacttctcacatccagaactataaaagaataaatttgcattatcttaaagcactaaatttgtggtatattgttataatagcaatacaatactaattcagacaggaacttcctcaacttgataaagagcatctacagaaaacctgcagctaacattatatttaatggtgaaagactcaatgtttttcctcctaagactgggaacagggaaaggatgtctactctcaccagtcttattaaacaaagtgctggaagttctagccagtgcaataaggcaggaaaaagaaataaaagatattcatatcagaaagaaggaaaatggtctctatttgcagcttatatgaccatctacgcagaaaattccaaaaaaaaactacagaaaaactagaataaattagttaagcaaggtcataggatacatgataaacatataaaaagcaattgtatttctatactagcaatgaatatgtggaaatatgatttaaaataaaaaaccattaaggataaatatgacatgattacacttatatgaggtatctaaaataatcaaactcataaaagcagagagtaaggtggtggttgccaggggctgaggggagaagaaaatggggaattatccaatagatgtaaagtttcagttatgcaaaatcagtaagttctagagatccgctgtataacaaagtacctacagttaataatatggtattgtgcactttatgttaagaggctaaaacttaaatgttcttagcaaaaagcaaaacaaaacaaaaaaacacatggaagtttttggaaatgatggatatgtttggtactttgtggtgaaagtatcatgggtctatgcatatgtccaaactcatcaagatgtatccattaaatatgggcattatttgtgtatccattttacttcatcaaagcttaatattaaaaaataaacaccatttgcaatcactcaaaaaatgaaatccatatgtgtaaatctaacaacatacatactaaacttgtgtgttaaaaactatgcaatgctgataaaagatctacattgatcacataggaatttcagatttagaaactttttgaggctaagaagccaaatcaaggcagattttagattttacctatagtcttaaggttcttgggcctgctagaaagtgatagtttttactcattaactgtcaggctggaggctgggcacagtggcttatgcctgtaatcgcagtactttgggagctgaggtgggtggatcatctgaggtcaggagttcgagaccaacctgaccaacatggtgcaaccttgtctccactaaaaatacaaaaattagccaggcgtggtggcatgcgcctgtagtcccagctactcgggaggctgagaacctgggaggtggaggttgcagtgagccaacattgtgccattgcactccagcctgggcaacaagagtgaaactccatctaaaaaacaaaaaacaaaaacaaaaaaacaaaaaacaaaataaaacaaaacaacagctgggtgtggtggctcatgcctgtaatctcaggccaaggcaggcagatcacttgcagccaggacttcaagaccagcctggccaacatagtgaaaccccatctctactaaaaatacaaaaactagttgggggtggtggcaggcacctgtaatcccagctactcgggaagctgaggcacgagaatcgcttgaacccaggaggtgaggcggagattgcagtgagccgagatcatgccactgcacttcagcctgggtgacagaatgagactccgtctcaaaaaaaaagaaaaaaagagaacatatacataattaaaatcagaaataagagtggggaaattactaccaactttacaaaaacaaaaaggattataagagtatactatgaacaatccatatgtaaaaaattagataacctagataaaatagacaaaatcctaggcatatcaattaccaaaatggattcagcacgaaaaagagaatctaaatacaagtaaagagtttggtaatcaaaacttcccaacaaagaaaagtccagtactacatggcttcactggtgaattctaccactcatttaaagaattaacaccaatccttctcgaactcttcctcccccaaaaaacagaagaggccagcattactttgattccaaagccagacaaagacaccacaagaaaactacagaccaatatctcttatgaatacagatgcaaaaatcctccacaaagcactagcaaactgaatccaacagcatattaaaaggattatgcaccatgatcaaatgggacttatcccacaaatgcagtattgattcaatataagaaaaatcaaggccgggtgcggtggctcacgcctgtaatcccagcactttgggaggccgaggcaggtagatcacgaggtcaagagatcgagatcatcctggctaacacggtgaaaccccgtctctactaaaaatacaaaaagaaattagccgggcatggtggcgggtgcctgtagtcccagctactcgggaggctgaggcaggagaatggcatgaacctgggaggcggagtttgcagtgagccgagatcgtgccactacactccagcctgggcgatagagtgaaaccccatctcaaaaaaaaaaaaaaaaaaagaaaatcaaacaacatatcattaatagactgaaggaagaaaagcatatgattatctcaattgatgcagaaaaagcatttgacaaaatccaaggcaaagtgtggtggctcatgcatgtaatctcaacattttaggaggccaagatgggaggatcttttgggcccaggaatttgagaccagtgtgggccacacagtgagacctcatctctacaaaaaatacaaaaattagccaggcatgatggcacacgcctatagtcccagctactcaaaaggctgtggcaggaggatcacttgaggccaggaggtcaaggctacagtaagccgtgatcgccccactgcactccagcctgggtgacagagcgagaccctatctacaaaaaaagaaaaaaaaaaaaatcaaacaaaaaactcaataccgtttcatgattaaaaaaaaaaattgtgagcaaactaaatagaagacaacttcctcaacacgataaaaggtatttatgaaaaatccatagctaactgtatactcaatggtgaatgactgaaagctttccccctaagatcaggatgcaagacaagtgcttttatcactgctattagacattgtactggaagttctagccagagaaattaggcaagaaaaataaataaaagggatcagaattaggaaaaaaaaatgcaaaactattcctattctcagataacatgatctcatatgtagaaaatactaaagaattcacagagtatttgatataataaactcagtgaagttgcagggtacaagatcaacaaacaaattggttttacttttatacactgccaatgcacaatacgaaacagaaattaagagaacaattctattaacaattacatccaaatgaataaaatacttaggaataaatttaaccaaggaagtgcaaggcttgtacactgaaaactataaaaggttgctgaaagaaattaaagacctaacaaaaggaaaagacattctgtgttcatggatgggaagacaagatagcaatactccccaaatttatatatatatatctccttatcaaaaattccaacttcctgttttacagaaatggatcctaaaattcatatggaaatggaagggatagccacataatcttgaaaaacaaccaagctggagaacttatacttcctaatttcaaaacttacaaagcttacagtaatcaaaacaatatcttactggcataaggataaacatatagataaatggcataaaatagagtccagaaataaacccttgcatatatggtcaatcgatttttgacaacagtcaaagaccaagaccattcatcaatgggaataggacagtctcttcaacaaataatgctaggaaaactggatgtccacatacaaaagaataaagctggatctgttccttacaccatatacaaatactaactcaaaatggtagtttctcaataaattaagcagggattaccatagaactcagcaattctattcctggatatatgggtagacactcaaaaacatagaagacaggtgttcaaacaaaaacttatgtatgagttttgtaaataacgccaagtgttcactgtggcattgtttacaaaagccaaaatgctcagctctatatgttgaaaggtacacatagccagagaagagaaaactaagggcttgctggcttctcagctagttgagggctgaagtcatacccatggactaatgagtggataagcaaaatgtggtatattcatgtgacagaatattacttagctataaaaagaatgaactaccaatacatgctagaacacaaatgaatgttgaaaaatgagtgaaagaagccagtcacaaaaagctacatattatatgattccatttataggaaatattcagagtcagaaagcccattgagacagaaagattagtggttgccaggggaagggaatgggggaaaatgggcagtgactggttactggaatgggatttcctttggtggtgatgaaaatgttctagaactagttagtcgtgatggctgtacaacattctgaatgtactcaatgtcactaatagctttcatattacatgtattttctccacaatttaaaatacaaatatacatttttttaaaattccctcaaaccagtgggcaggattgaatggagctatctttccttgtttagggacaagatccctgtctcctccatgagaaagcataagaaaataaattcaaattttctaaggtactgatgagtccctattttaattgtgaagtacaaagcaaggttctattatcagtccagggtctgcacctgccaactggacaatcttcttcccaggaatcccttcagagtacttttacctctaaaataatgaggtttccaaaacgtggattttttaaaaattcaaattaatagttacaaatcagagaatccaactgggcaagcctcactgtttattaaacataccactttatctgggcttccccatcctgaagctgtctagttataagacgaaaaatgcaaatgatccaggccctccagcttttctagtcatagtaaaagtcacattgtgttgatctagctctgtcacctacctaggatctaccctctaaaaaaggaaatcaattagaaggaaacactgggcctaatggaactcaaatcccccttctgttgttcttcctagattaggtgtgttaacactcagcaacttccatcacctaaaatgatgagaacattgtttttcttcaccttgccttgagaacacataattgaatttccattttctaaatctgaactgaacattttcttcatttcagccatactaggttggagctggtctgctgcagtcagcctgaaaatgagttggtctctacaatctcaggagacaagcccaaatccttcctagaacctctcttatttgtgatgccaacaacagcttacaaccacaactgcccagaatggagaagccagaaggatggaggctgctccacctctgaatgcccacatcacctctgcctggaaaaaccgggtgttctaagcttagagatgagggaaaggagacttactgggctagagaacaggaccagaataaacttgatacaagtgagtcacagacctaactgtccaagtctgaactctggataacttgagagagaggtcccatgaactctgaacttgtcctcaacagaatgcttgcttgtagccaatatccattttcatccagccccgggtatgcatattgcttcagaccatgcaacagaagaggaaactaaggctcttaatatcccttgacttcttgttgcattctctgaaacctttagggaaatttggtcctagaaatgaactaacttccctaaaccatgtcctctcctgaggtgaactggacaaaacaaaggcttccaaaagaaacccttatattcacaatttggataattccagaggtctaagagctccccaggagtaatgctttacccttaaagaaaataaggctagcacctgggtatcttggctgttcagctctatatgttgaaaggtacacatagccagagaggggaaaactgagggcttgctggcttctcagctagttgagggctgaagtcattagggcttggcctcagctgcagcacaggaaaaatggaggatttcttgcacttaagaagtttattaatgaatgggtatggaccagttggtgtttacatgcttgatccctacagccttggtgtactggctgcagggcctgggatagaagctcactgtctgctggtcactggtgatgttactccaggaagatgatgggcctcctcttgggtccaaggtaccagggctctgagccgacgctatcaaacagactccacttttgtttccagtgcctgggctggggaaatgagggtttttaggatctcagtgtagtagggaccaaacacctgctgattgtgatgtgtcaagttgacaaacttttggcccagttctgccagttctgcttcaatgagagtaaggcctccaggaaggtctaatagagaccgctgcacaccaagaaccaaacagcatttgagaaacaaatggatccgctgatctgtgagcaggaaaagacactgataagggaaaaggcaaacagatttcagggagaaaattccccctgcactctactcacccatgttctaagttaacagatatgtaccaacctgcccccctacctagagataatgaaatttgttttgtttggaaagggggctgctatcttgctctcaaggacaaatataaaaaactagtgtgttagtaaatttcagattattcaaaagattgtttaagtagccatcagttagatcctagtgagtgtttgacataacaggaggaacttagactgatccttcagatggctaaggttaggagcaggctggccaagttcatggcctccactccagcatgagggtaggggattccccactataggaacatgtcttccagctaaattcagcattagtttcttgttgggagatgggggaatgtcagatttcttgggtgccatcagagaatgacctgtaggcccaagtgacttaaccaggtcggctggacatatcccacacctagaagtcatgaatttctgggtgcaaatca

SEQ ID NO: 30 - DNA, 1252863 bp, Homo sapiens
  source 1..1252863: mol_type = genomic DNA
caggctaatttttgtatttttagtagagacggggtttcaccatgttggccgggatggtctcgatctcttgacctcatgatctacccgccttggcctcccaaagtgctgagattacaggcgtgagccaccgtgcctggccaggccccttctcttttaatggagacagggtcttgcactatcacccaggctggagtgcagtggcataatcatacctcattgcagcctcagactcctgggttcaagcaatcctcctgcctcagcctcccaagtagctgagactacaggcacgagccaccacacccagctaatttttaagttttcttgtagagacagggtctcactatgttgtctaggctggtcttgaactcttggcctcaagtaatcctcctgcctcagcctcccaaagtgttgggattgcagatatgagccactggcctggccttcagcagttctttttgtgaagtaaaacttgtatgttggaaagagtagattttattggtctacccttttctcactgtagctgctggcagccctgtgccatatctggactctagttgtcagtatctgagttggacactattcctgctccctcttgtttcttacatatcagacttcttacttgaatgaaacctgatctttcctaatcctcacttttttcttttttaaaaagcagtttctccactgctaaatgttagtcattgaggtggggccaattttaatcataagccttaataagatttttctaagaaatgtgaaatagaacaattttcatctaattccatttacttttagatgaatggcattgtgaatgccattcttttaatgaatttcaagagaattctctggttttctgtgtaattccagatgagtcactgtaactctagaagattaaccttccagccaacctattttcctttcccttgtctctctcatcctcttttccttccttctttcctttctcttcttttatctccaaggttaatcaggaaaaatagcttttgacaggggaaaaaactcaataactagctatttttgacctcctgatcaggaactttagttgaagcgtaaatctaaagaaacattttctctgaaatatattattaagggcaatggagataaattaatagtagatgtggttcccagaaaatataatcaaaattcaaagattttttttgtttctgtaactggaactaaatcaaatgattactagtgttaatagtagataacttgtttttattgttggtgcatattagtataactgtggggtaggtcggggagagggtaagggaatagatcactcagatgtattttagataagctatttagcctttgatggaatcataaatacagtgaatacaatcctttgcattgttaaggaggttttttgtttttaaatggtgggtcaaggagctagtttacaggcttactgtgatttaagcaaatgtgaaaagtgaaaccttaattttatcaaaagaaatttctgtaaatggtatgtctccttagaatacccaaatcataattttatttgtacacactgttaggggctcatctcatgtaggcagagtataaagtattaccttttggaattaaaagccactgactgttataaagtataacaacacacatcaggttttaaaaagccttgaatggcccttgtcttaaaaagaaattaggagccaggtgcggtggcacgtgcctgtaatcccagctccttgggaggctaagacaggaggattccttgagccctggagtttgagtccagcctgggtgacatagcaagaccctgtcttaaaagaaaaatgggaagaaagacaaggtaacatgaagaaagaagagatacctagtatgatggagctgcaaatttcatggcagttcatgcagtcggtcaagaggaggattttgttttgtagtttgcagatgagcatttctaaagcattttcccttgctgtatttttttgtattataaattacattggacttcatatatataatttttttttacattatatgtctcttgtatgttttgaaactcttgtatttatgatatagcttatatgatttttttgccttggtatacattttaaaatatgaatttaaaaaatttttgtaaaaataaaattcacaaaattgttttgaaaaacatttttggattgtttcattctttgcttgtcatttatctgttgattagaccactaaagtgaaggattcaagctaaatacatcaacctttctatttaggctttatcagctatatgtaaattcaattctatcaaaattttctgagtgcctcctcagtgtgtctctctgatggttcctgcccggtatggctggcatgaagaagatcctgtaaaaaagagaattcatttatttattcacttagtttgttcatgcatttgtttaataaatattgagatgtaccatgtgcctggcattgtggtaggtattgggaacacaggagtgagcaaaacaaaagtcttgctctactgcagttaagggccagggagaggcagaaaaagtaaataagtaaaatctatagtgaatttggtggtatgtacaagcggaggggaaggggttacggttttagatggactggctctttcagaagctgacacttgtacagacctgaaagatgtgaggaagtgagctatgcatctgtcgggaaaccattctgaaggatacagcaggtgcagactccagtgggatggttggtgtattctgggagcagccagacggcccatgtggctggagaagggtgagtgtgaggagtctaacaggagaggcagagaggaattggggtagcaccggaggctgcctcttaggccacagtaaggacttcacttttgactctgggagccagtgtaggagttttgagcagtggtctgatttaagctttaacgaatcacccaggcagtgggaatcaactgaaaggggaaccagtgagaagcttttgtaatcatccggacaaaatgaaggtgggccagactagggtggcagcagcagagcttgtgacaagttggattctggacatattttgaagataagagttaataggatttgctgatggattggataaaggttgtgagagagacaagaaaagaatgatgcaaggttttagcctgagcaactggaagaagagagttgccgtcagctgagatgaagacaatgaaagcagctttgcggacgcggtaagtttgagatgcccgttaacgagacatccaggtggggatgctgagtaggcgggatgcaaggctctggagttcatgggaaagctccaccaggaggtagaaatctgagagtcatcagtgaattgatggtatttaaaatcagaggagtagatgaaatcagcagtgaagtgggtgtagatagaaaagacagggggccccaagactgagtccagggcagtctggagatcagtgggatgagggataagcccaggagactaaaaaggaccagcagagactaagagttgcaaattagtgtggtaagtacagtgaatgcagcaggcatgggccccttaacgtcttcttgtctgtagtccttgatcagtctgctcattcacccacctatctatcctgtactccttgagcatctgcatgccaagcactgttttaagcagcagaggaagcaataagtaaatacatttgagttgttgagagatcatggggacaacagatgataagaaaacaggacagtatcagcagttgtcttatctgaaaaatgaggatccgttcctccctccagattgttgtaggatttaatgagataaagctcctgaagcacttatctcattgcctgcactaagagaccgctcaggggacattctgcaatgccatttgagctccctcctctttgcctggcaacagccccagctgccatctctgcctccagttgtgcccttctgcatgatctttccagagcactcatctgaatcacattaaacttctctgtttaaactttgtgtttacacttctgtttaaaccctggacctgctccaagttctcttctgtagctttgtgtacactgttttctctatgctgtcctctcaccgattttcttttccccgctaactccctatgtttcacaaattctttaagatgaccctcaagagctgaagggctgccctgccctctcctagcattctcttttctctgtcatggcttttgttgttttggaattgcttgcttattgaggtccccagtaaatcgtaagctccttgaaagccaggactgtatagagtctaacatgagcctagcattgcaatgagggcctcagtaaacacttgttggatgactggaattcatctcctgagttccatgggatgaatttgcccacgtgttcataacacagtctatgttcttcctttccataaggatatcatgaggctgtcaaatgaagatgtagcatatcaccagcattttatcttgccgttttagtttggcctttttctgtgaaacatcattaggggaaagtaaaactttacttggacaaaagaggtttgctaccaaattatataaaatgaataaacatatccctggagtgtttaagtcagcaagtatggccatctattattccacagacattttatattataatttactcactgaactttaacgaaggagaaaatgattttctaataattcttagtctttgaagattgtcactggaatacattccttgctcataaccactccccttgggaccgtggatatactatacagttattaaaatgcctgaattagaaaatctgctgctcttgggctatgagtttaactatagaagaattactgtatatgctcacacgagaggggcagaagaagggggtcacatttgagacgtagcagagaccaggcctttgaagtcctctggcatcaacaatgacttgctcctgagtcaaatgatgtgagaaaaccagaatttgggaaattttcatttcaattaagattcaggaaaatgagtcactggtgttctttgtaaattcatttatgaggtcaggcccccagaactgggaatgctccttatcacatagaaatgaatagaaaaatctgcctctgtaatttccatcacccagggctagaatatgtaactagagagggtggtcgaggcctgagtttgggtctgggggttcagagcaaccgatcaaactggaaaactgagcaggtgagtggagactcctgctgttctgaggagcacacgttcgcattcattcaaatgtttatcgccgctccactcgaggcactgcccaactctcatttatcttcacagaagttgagtggatctgcagactgcagcttcagtttttagatagaggaagaactaaaccccagcagctaatcggtgacaaagccagggctagaatccaaatctgctattctttatagatagaaaggccaagactcttaggcttgtaagtcacctgtcagtcacaactggaagtagaatactcctgggttcagtggcagatgacatcagcctaggggtcataaggcttggtttcactagctggggaaagtcatccaatagcttacgtgatggttttggagatgttcttatattcaccttcaattagcagtgagcccttcactaagcccttcatcttgggcttattgccctacttgctgtcaattaacctctggagacacaccaagtcttttagaaggaaggaagggagctactattttttgagggccttttatgtgccaagcccacaggctgggcattttccatacgttatttaactgaatcataacagtgctgcaaggtgttatctctttcataggtgtgcaaacagatgcagagaggttaggtttccagggccccacagccaagtggtggagctgggtttctggtccacggccttctgtctccactgggtgacactccctgtaccttctcattgaagcccctgggctagagggtccaagagcatcacttcagttctgcatttcattcgttactcacttgcatcaggacagatgcatcactactaagctctcggagaaggcatcagatgctgtctgctcccaaggagcttctacttttggtagtctgcttaacttgtatctgtgcctgtagagattgctctttgaaaaaagcagcaggaacattctgatagaagccaatggatgggacaggtggggggaatgcgttggatttgccagcacctggccactgcccaacctgctctcaattctcagatgattcaggtattgagcaaggaaggtagcagagctactgttgccttccctttggggaagcctgtttctactttgaaactcttaagggattcatttcaaattagtggcaggccttggttagtggatctgtgtgctgtcttctgccatcttgattgcatctccccccttctccttttcctttcatttgaaaaaagatgcagcccctcagagcctcactttcctgatttgtcaaatagggaacctaatgtacaaggcttttgtggggcttagaaaaaacatgtcaagaatctgatatagatctcaataaacagcataatacttatctttcgtcccagttacaaacccccattcctgtactgcccaaatctccatgattcacaaattgcgaccctgctgcttctgctccatggcagacacctagctccaggcaccctcctctaccacctccttctccttatggccattggcttttaggagacagacattgcttacttagcaggaaagctgtcacctgctttcttttgaactatcccgaacttgattctctttgggcgacgcatacacccatcaagtggtaaagaagactgggaatgaggggagaaaagaccctgggcttgttgctggggccagtagcttgggagtgtggtggtatgtgtgtggctttggctgtcaagtggatctaagttcaaccctggctacactgactttccagctgtgtgacttcagcaaatgggttaatctcctcaaggattcacttcctagggaggctttaaatgtccccgggtgattccagtgtgcagtggaggttgagagccagcgccctctactctcacccttgatgcccaaccaactcattgccagtctcctcctttagcacagcccatgatgctgcgatgtctgccaatgcagcatgcccctttgtgcctgctctgcccataacattctcaggagcttgctggacagcacagatgtttggtgtgcatattaacccagctgtggggatctttcctgctcaggtttggtggctaatttatagagcagctctgtcaggatgatcaccaatccctcttacaggcactgctttctctgttcaagtgtctcacatgtgtgtgcttgtgtttgccttttagctattactgtgatgattcccaatgtagtagacactgccagtgaccaccgcaatatccaatctcccccttttcctcactaacaacccctgcattgttgggggctgcagtgtgctcagctaaaactaacaattgcagccacattttccatcctcctacataggggtggccaataagctgtatgcagaagttgtggggtggagcttccaggaaagctcttaaaagtctgccttattcagctggacaatgcttccatcctatggtccttaccatcttttctaatgcctggaatatgtgtgtgctggaggatgctccagcagccattttgtgacaatgaggcaatcttgaggctaaaagccacttccaaaggatggcagagtagaaatatagaaggatcttgagatttcaatgatatcataaagctacaattccagctctgtactgcctatctctgaagttcatgttacatgagggaaaattcaacccctgcctcgtttaagacattgttattgctggtctttgctactagttctttagttcaattcctaactgatacttcccaaaacaaacctggtgaataacagcaattcaacaaatgtcaccgacccctgaatctctgcctcctccacccactcaccccagctacaaacactctttctttctcctgatgagtaaccgggcatctagctgtaaggttgctgaagctttgtggaatctcagaaagtcataaagctactgaacaagttcacaaacaagtgatgcatagaccacacccagcccacagatgagttctgtgtggctcacacttattttttaaaactgggtttgctgccaacacttcaaaacccaacgattttgcgtgaaaatccagatttcttagaaaatctgtggacccagggtcttcctttctgcctggcaacaatcagctggaactcagcagtggttgcccctgagatgaggcacagccccatccccctcactcatgtcacctgtatggcttggaaggcatgtgagtttgcaacctgctcaaacccacaccccagaaacggcccgctaaaatgggatttcagaatccacttgtacctttcttctttctcagtctcccctgactcaacacagcacactggcattgtttttttcctctcagacaactcagcatgcacttttgagaatcagagagaaatccgcctctcaaatgtcagaaaacagctgatgctgcctcttacttgggggccttttgacttcccacgtgtcttactgccacttgagagggagggctgcaggcaggcaggctccctggggagcagctgttgggatgcttgattgaggccctgagacagccagaggacaattaaattgggtattgaatatgaattgctttgaatggtttttattaccacattgtgagctgactttggttgtaaaatctgactccatctcttgctcttactgtggtgatgagacagaacttcaagatgtcttaaatagcagggcttggaacatgcatattagctcatctgtactcgtgaagtctgtcatctgatacccgcgctcctccactgtctgaaccaagttaggagccctgattaaacctccgcggctgcagtcgccaccttccgccggggtgaccccattggagatgacaaatgaaggatgtcttatttcagcctgatgtgtaagtcttcacagcactggtcgttaactactcttggaaagttaaatgcccatgcagctttttttttttttttccccaaacaaacataggtctctgaggttttggagagaaaaacaaaaactgttttaataataatttgtagctatgctttttgatgagttgcacactgagtgcaatatgttggctgcagaatgaccatctttgcagaagcaactctaaggaaagtgatgccacgctaagcacagagtgagttctcaataagtagaccgacttgagcggaagacagaaacagttaagtggagttggcatttccctggttggcaccaaggtctcagggttatttcgaccacaaaattaagttccagctcctagctactaacagagtcacaatatgcagcatggtgatggtcaaaaggcctgagcaagttcaaagcgccgtctctgccggctttggaaccggtttctgtgggaagcaggactctgttgctggggcaggcagatgcttgtgtccatttgcctagaggcagtaaatgtggggctggctggctggctgttggggagctaggactggaatatggggtgggccagtgggccttgctgcatgtagactctgtgctggctgtgttggctagttagttacccaactttatttcaaaaaatgtgtttcgaaccttcagatcgactagcctatctaaaaagagaacttagaaagttattttttttaaaaaaagtcttcttcctacggatttcctgaacatggccattatattctaattctcttgaggctagatcacttatcaaattttcatttcttttcagaagtaattaggagtgatgctaccttgaatccaggtgtgaatttttattgatttttgaggatttggccacgtgttcctttatccaagcctgtcttctgctccatcttatccaaacaaacattgaaccagcaatattcccaagtattccaacttgagaaaaatcttgtgtgtcttgagaaaaatcatttccatgacttattaatgaactaactagggataattttcatagggttcgttaactcagatttatcatagaatacaatttaataagaaacaattaaatggagtaattgaattcaagtccttttttgagtaatgatgttagcattcaatgaccccccctgcccatggttattgaagttatcaatgtatcaattttccccttgaagaaaatcagctgcaaatctcttcgtcaatgcatgggccgcctctcatctgccccctgcaggcctagcccttccttttcccgtccctgctctggtctatggggctgctgtgtgtatagaaaaaaatgaaaggactgatgaccatgtagataatgtttttccaaacataccatcgaggctgtgctacaaaagtgatccagtttggtggtcctttctcttttagagatgcctgttttgacaattcctccttacagtctgctttaatatttaaaagaaggcagtgggggctttaggttaaaattaaagtttcagaggcctgtgtatctttctcagactggttgaacttggaactgtgcaacttttctcaacaattttgccaattaaaaaagtccctttagctgtagatgctgagaaggctgggcctttggttctgctcctaaatgggagtggggaaggtgctcacagaacgatgccaagcaccactgctgtacaacttctgttttatttttgtgtgctttttttataggatataaataatgacaaaaattacaaaatttataactggaagcccaagcttatttacacatatgcttctgtttcagcaaagctcctattaactttgctcctatacaattgcctcctggtaccatattttagtgttatttaactctcattttgctacatacatatcaacagtgaataggcaaaatatatacaaggaactgttcagttcaagtaatttaatattgtattaaaattcttcaacactgaactaaaaccgtatacatttgttagtttgaaataaaatgtagttattcttcaaaactcaccaactgatgaatgtaactgatcatctcagttaggtttaaaataatgtcagttaataaaaaaacattaagacaattccacaatttatcaatatcgctataatgaacttcaaaatgattcacaatatgattgttagaacaatatacattaaaatgttatttttttctataatgatattggtactgtttatataatttgattctacataaatatacattatggtatcatacaaatactccacagagacattaaaaaattaaaataccttaaagaaatgtaagtaaattttatttaatcaaatagtaagcaaactttttttttgtttgtctcaagaaaagttttattactttggaatttcttcttttttttttttgtatttattttttctagaaaaagaaatttttgcaatagaattttattaacacctttctcaaacaaggtttccatgacagaaatcttgacagcaggagcactagatttttttttttttaacatgttctttaaaacactgtgaagattaaaaaacaatcttggcaggctgatggctgcgtcagcacttccgggcctcctgctctagggagcatcaccagtattttgccaccactgagccagtcctcttggtagtagcagtagaaatttaattatttgaaatgaaaccagaaacatccctcgcaactaacctagttttcttatcaatgcattaatgaaacattcttttaataaaaatatttaatacaagacacattttgctgtgcataataaattcctctgctttgaatcattctttccttttgaaccaatcatttggttgaaaggttttctttctctgacataggtgattacatataaaatccacaaatatagaaatggggaaacagaatctcctggcaatcatatcacgggagttgtttttgtccttttgcattaaacgatactcaatgatagaatgattttacagatgctttggaggtgggaggggtagtgctgctctgatttcacctttaaaactgctgacagtgaaagcatacttttaggcagtattagagatcccctttacttttttttttttttttttttttttaaagaaaaggtattattttccccaaatgaagcaaagcaagtactggggcggagtcatcagaaataccttgggaggtggtggggaggggagtcgggagcatcagggaaaacccatctcaactcacgcctctcaggggttgcgactggaaagtcttgcgttttccatcactggtgcagaaagaacttccccaggaatggccagtggcctttcgcccgtaacaaggccgcacgctcagagcagtcttcctcctgggctgggtggacgcggaggcgcgaaggaaagcctgctccgggaccgcttggcgagcaaggcaccgcgaggacaggaggacggcgagtatcagaaaatcgtggtttcatacttggtattaatgcccctcttggcttcttggcccggctccacaatccacggtagattggccagagtcttttgctcagatgggtcgatctgctttaaaacagaaaggctgatgcctgttatacggtcgccgcgcgggtgcgcgcatgcacgcggacgccgctggcgaacccacgcgaggcccctcgccccaggcgcggggcggcgatgctggtctaggcggctcgcgggctcgctctttggacacacatttaccgcataccgactctctgcagggcaccctgagggtgacggtgaataaggcacagcccttgcccttgtgagcacacagacggggagcagacagaggcggatttcagtgctgagaggtgagatacgaggggaagagagggcaccatgtgggcacacacaccttgggagccaggggggcttcctggaggaggtgaatcaggcatgccactccccggctctcactctccagtggtttccatcacagtcagtcagaacaaaacccgaactcctcaccgtgacctccagtacccctgcccacctgatttttctgctgcagccacacagcttccttgctcttcctgcccgccaagcccacgcccagggcctctgcgctcatcatctgctctgcccgagttcccttctccagacacctgcatgcctcatgctctaatgccattcaggtctctgctcaaatgccacttccactggcacctgtattcctagaagcctttcctgtttactcctacaaaaagcaccccaacttttctgctctcctcttctgccttattcctgacaatacttattgccgctatgcgtcatcacatatttatttgttcatcctccactgccacgtatgctcatggaggcaggattttgtctgttttcatcactgccattttctccaaaacgcagaaaagctcctggcaaccccgtaaataataggcacacaataaatacttgttgaataaatggtatcaaaagaatgaggtaatatttaaatggacagccgaaggaccagcaagtatttgcctgaagacaggaggagggggcatttgaagtagatgaaacagcacatgcagcagtcccagaataatctatacaacagaatgaaacacagcctcatcttccactatatacagaaatcaactcaaaatggattaaagacttagagggaagacctgagacgatgaaagaactggaagaaaacattggggaaacactacaggacattggtctggataaagattttttgggtaaaatctcaaaagcacaggcaacgaaagcagaaagagacaaatggaattacatcaagtgaaaaagcttctgcacagcgaaggaaacaatcaacaaagcgaaaagacaacctacagaatgggagaaaatatttgcaaagtatccatctgacaagggattaacaaccagaataaataagggactcaaataactcaatagcaaaaaacaaaaataaaaaacaaaaacaaaaacaaaaccaactcaatctgattaagtaacaggcaatagaactgaacaggcatttctaaaaagacgacatacaaacggccaacaggtataggtaaaaatgctcaacatcactaatcatcagggacatgcaaatgacaatcacaatgtgatacgatctcacccccgctactattgaatggctagtatcaaaaagacaaaaactaatggatgctgatgaggctacagagaaagggaaacacttctacactgttggtaggaatctaaattaggaaaggcactatggagaatagcatggagggtcctcaaaaaactaaaaattgagctaccatatgttccagcaaccccactactgcgtatatatacaaaagaaaagaaatcagtatatcaaagagatatctgcactcccatgtttattgcagaattattcacagcagccaagacatggaatcaaactaagtgtccatcaatggacgaatgggtaaagaaaatgtggtatatatacacaacggaatactattcagccataaaaagaatgagatcctgtcatttgcagcaacatgaatgaactgaaggtcattatgttgagtgaaataagccagacacagaaagacaaatattgtatgttctcatatgtggaggctataaaaagtggatctcatggagattgagtagaatggtggttaccagaggctggaaagtgaagaagggagagtagggatgaagagagattggttaataggtacaaaaatatggttaaatagaaggagtaagttctagtatttgatagcacagtagggtgactgtagttaacaacaatttattgtatatttcaaaataactagaagaattgtaatttctcaatacaaaagaaaaatatttgaggagatggatatctcaattactgatatgatcattacatattgtatacatgtgtcaaaatatcacatagcaataaaaaacagtcccagaggtaagggaaaatggtcgttgaggggttggggtcagtttgcagggtggggagcgggaaggcagacagctaagggtgaggaggtgagcagggacccagtcaggctaagccttgagacaaatcctaaaatggtttcgtccctgtgcgtacaaatacaacgggacactcctggggcggggccgggctgtccgctctcaggaacggccctcaggtggatctacaccatggctgcctcttcctttggtgtttccaggtctgcctgccctgtcctagctgcctgctcttctcagagcctgaggttgtgggaaggcctctcccatttctctggcaccatgagctttgcagctgccttctaccgtgccttgactgtatctccataaagctgtggggaggacctcacgtgttcttagggatcactgaatatttcttaccaagaaatgcctggggctgaaggaactagaatactaatgcctgtcgagggggactgatcttgaagcacataaataacatcagtattattcactgtatattttcctatttcccttgaaggcatctggatgaatattctatgagctcttatgccacccaaccctttgtgctcttctggaagaagcctgtggggaccagggtaaggtcagatagaggcacctgctgtgaacagatttattcagcccacatgagaatgaatacaatagtctaagagataatctctaaaacattctgcaaattcctggacacttagcagcctaatcaatctcaaagatatgcttgtgaaatccatccacaggccctcattttgtcatccacagatattcactgaacacctgctatgggcctggttccggtggtgacaacacaggtggggtccctgtgtgcatgaaacttacatttttttttttgagacggagtcctgctctgtcgcccaggctggagtgcagtggctcaatctctgctcgctgcaagctccgcctcccgggtgcaagccattctcctgcctcagcctccctagtagctgggactacaggcacccaccaccacgcccagctaacttttttttttttttgtatttttagtagagacggggtttcaccgtgttagccaggagaatctcgatctcctgacctcgtgatctgcccgcttcggactcccaaagtgctgggattacaggcgtgagccaccgtgcccggcccaaaacttagatttttgtggaggaagatagacaataagccatcagtaaaaaaccctcaattaataaatgctacacagaattaaaagcagatgacatgcttgaaggtgactgggtatctatgtcagattgggtggttaggacatccgcctcttcaagtagccgagacctgaatgacaagatgaagtcagccatgcagaaaccgggggaggatattccaggtgtggggagcaggtggcataaaggcctcaggtaggagtgagcattacatagtcaaggaatgggaagagctgagcatcacagaggactgtggtgggaaactgcattctgggtacttggggcagagggtgccatgactgatctctgctgtgtggggaggggagtctcaaggagctatactgcataggcctggggcgaggtggcagtggccccgactggaagagagatggaggaagtggggaagagtggacaggattgagatatattttaggggtagggtggatgggatttgctcatgggctggatacagaggtaaggggaagacagggatccaggctgacttgtagactttgggcttgagttgcatggtgagtggctgtggggtggggaagttggtgagagaagagctttgaggggaaaatcaggaattgtgtcctggacatgctaagtttcagatgtctgtgaagcatcaaggtggaaatgtgaaagaagctggccacgtgagtctggaattggggggtgcccagggctggagatacagaactgggagccagtgtgttgggttgggtcagtgctgaatgggaggaccaggggctcagagcgtggcatcggaagaaagacttcagaggagatacagctcctggggatggctggtaatgagtgatggacacaggagcgaatggccggggctggagggaaagatcccgaaagtaaactgtcagggaactgtgagaccagatgctggaggggtcaatcctgtggatgttgatggtgccaagaagggtgacaggggtaggcccccaaaagaagactgaaaacaagaactgcatgttcacaaagggaggtgcctccctgcaaatgttaaaaatgcctgctgctgttccccatgacagtggaggtgggggctggtgagaaggaggagagacagttccagatggaaggattcgggggcgtgagagcaatgcattctgggggagtcccagggtttctaggatgcaatacggcagccggggcagaaaccagatgggaggctggttgggaatcttccagcttttgaatattgctactaccagaggaggccgctttgaagtcatgcaagcctgttgggacaggatgtctgcagagcctgtgggagggaaggggaagaaattcctggaggaaggcagatgctgagaaggaggggctgcaccttctgaacaggcaccatgccgcaggaagcctcagctgcgggagacaaagcacgcaggccatggcgcaggccttgcatatagcagggcagcctgtgcatccagcttcctctagctggggaccgaggacatcatcactgtgtacctctgcaaacctctctggaggccaggggcttgtaggaggctttgccctctgatgggatggcagctgaagccccagggaacactgctcccaagctttcctgaatctttaggtaagattcaccaagaacagcagtacctgctgctgagacccttcatagggttgctgcaggtgactgagaaagtggatttctctggaggctccaggttgagggagatggtgcccaagacttggtgggaaccaggcagaggtgatgatggacacatgccaggaggaggccaagggaaaggatgaagaagaggccctgggttctaatggcacccacaccacacaagggcctggttagcagccccttttcctcctgttcaaggttttttagaacatctgtatcgtttctacttaccacggacttgcgaatgctaacgcggggcttggggatgggtttggagggtttgttttcaaagctttctggaagtgtggaggagtgtcccccttttcttgcttgtagtgctagctggtaagcgacttcgaatgcctgtcccagggttaggatgatttcataggctaaattctgcaagaaaaatgagaaagcatttgctactggcacactgcaaattagaatgggtcgaatggctgaggaacactgagggaggtgaactagggaggaacttgaactacttcaccagaggcagcagcgattcggtggaaatctacaaagaacaggacactccgggtccaacttagggtttacaccaggctttagtcatttgtgaaaagaaaaatcttgggacctcaaatcactaagacaaacgaaaaagtcagctgggaactgtgttgggcaaacctgccttgcattctattcctaaataagatagctacaaagataaaaaagctacatacctccctcacaatttgcccaaaaggaaatttcctgtggacaaaagacagagctcaaagtcatgcctctgctcatgtgagataaatgcatatcagattgcttcccctgtcctgttgtttccctaagccagactaaggcataagtgactattcctgtaaattgtgtattcagtgaaaggctgatcttcagaaactcaaaataattcaactgtttgtctcttatctacctatggcctggaagcccccttcccatttctagttgtcctgcctttccagaccaaaccaacgtacttcttacacatactgattgatgtctcatgcctccctaaaatgtataaagccaagctgtgccctgaccaccttgggcacatggtctcaggacctcccaaggctgtgtcacgggtgcattttttttcttttttttttttagatggagtctcactcttgtcacccaggctggagtgcagtggcacaatcttggctcactgcaacctccacctcccgggttcaagcgattctcttgcctcagcctcccgagtagctgggactacaggcacgtgccaccacgcccagctgatttttgtatttttagtagagacggggtttcactatgttggccaggctggtctcatattcctgacctcatgatccacccgcctcagcctcccaaagtgctgggattgcaggagtgagccaccacgcctggtccacgggtgcatctttaagcttggcaaaataaattgactgagacttgtctcagatatttttggtttacacactgatagggcactcttgcttacagatccccagttagccccaggaggagcaggccccacagcccagtggccccaggagcccacaccattcaaagctctccctgtgggcagttggtttgtccccaaggccttggaaggtaaggggttactactggtatttctgctgagtcctgggagcacttcaaccttgcctgtgaggatgatcccacacactccacaggaggtgttcctgagaagtttgggtctttttacctcaaacatctgtgattcagtgaacatctacgaaacacaatcaaaatctaatttaggcctagaggagaggcattagtcatgctggtgtggcggctcacagtcgcagcagtgagcacgcaaacagtgctccaacagagccaattccccagctatttcttgaggcttttgctctccctgtgggtccactctatattttatcatgaaatcagcaagagacaggtgattctgtcaggctagatgccacgccaagcagcgcctgggagaaaagttcttttcttccgaccttcaatcagtccttttctcaagatgatttctagctttcttctcttctccaaatgtgtatctttgatttctgccttttcttccaagcacagcttccccttgtcttctctcactgagaaaccatcacattgtctgacccaaaagaggcagggtggccaccacaccctgaggtcacagagcatcagagaagcagatgcatactggtcacagagagtgttctgaaggtcactgtagcagctgagagcaggcatggtctgccccaagctttcttttttcttttttttttgagacagagttttgctctttttgcccaggctggagtgcaatggcacaatctcggctcactgccacctccacctcttgggttcaagtaattctcctgcctcagcctcccaagtagctgagattacaggcatgcaccaccatgcccagctaattttgtatttttagtagagatggggtttctccatgttggtcaggctgagcttgaactccccacatcaggggatccacccacctcggcctccaaagtgctgggattataggtgtaagccaccgtgcctgaccatccaagttttcattctgatgaatgtccctagaatgtccactcacggtttctcaaaaatcacagaaatgtcattctgctgatgctgatattgcaactaagctggccctctctgttcctgcccatctccaccctcatcaagcgctctgggagcccgattcccacactgctgctggggagatgtgtttgcgattgttcgcatttgaagatgatggagaggaagatgcaggatggtgccttctgaggccatgggaaagaggcccaagggttctagaccaaccagattccagatccatgccagatcaattgtgatggtctcagaaccaagtggggaaaatgcctctgagcttgagagtcggtttgagagaggatgtgtctgtctcctttaagtgagttgctaggaaatactgaccctacaagacagacatctgcctgctggagatactgcaccttgcacagcaagctgagcacttccttgcaacgaacactgagcccatgtttgcctccagagatgagtcagcctagtaaattagtaacgcaccagcaaatgatagtggaggaggtctgggagacagctctgaccatcactgcacaaagagggctgagctctttccactgcctacacttggcactcacgtcactgtcagctttgcctcttagtgtttgcgtgggtcccctctgaaaggcaggcagggcttccgacttctgtagtctcacaatgaagacacaggctcttggtcttgttcatgctactgtggaagatggctgattcccatctgttggggacatgtaccagatattcctgttctgggtgggaaactagactaagatgaaggtgtgagattcagtgattctgtaacatgtggtctttatctgctgtaacagtggaacttaatgagtgtgaattcctttaccattaacctaaaaacaagttactgaaagcgagatctacttaaagctccaggatcttcaaaggaaagtaaaaagaccttcatttgagcaagtgaggtttttcacatgattatgggaagcctaaaggttttgggagagaatgtgttagaagtcctgccctttcatttttaattagttcctggtattaggaaactgctcaaataagacacacagaccagactgttggattaagttttcctgcctaatggcttcttctggttccgcttacattttccttgacttcttgctttggttttattttagaatgctttgtcaagtttcttttgtgattatgtatagtacaggattggacactgttacctttcctctcttgtctgcagccctcctgtttgtggtactgatgctggatgccaggagggcccatgggcaccgagacacaccttccaagtgctgtgttgcccatcccgacacaccagggccctttcggggaaacagatgctcatcccatgggacctcaggacacatgtgtgaatggggaaagaacccccatttttttgtaggttcaattctcctgcctctcctattaacatccctaccatctgaaacgggaggagagttgctatcatgtacgaggagactctaccgggatgaggttgaaaattatattgtaacatcagaaggcttaggtgagaagcccatcttgcaaacctcaatgatgctggctggctctgaagagcccatggtgacacccagaaaatctgaaagcccaactgtctctgccttcaacatattatccctgcaactgtggggaggccaacgcctggtactgggtctggcacattccaggtgcagaagaaatgcttgcttgcttgctgaatgaatgaatgaatatccacaggactaactggagtaatcgtaacatttctagttaatactcagtctagctaccattaagggagaacttaataggtgtgagagatgtgccaagcattatctttgtttcatttaagtcttaccaaatcacatgcagtagcatattatcctcattttatagatgaggcagtggaggctcagaggggtgaaataactttccagacatcacagagacagaaagttacagaacttgacatgacccaatatctgtgctcaaaatcccccactcttggcccaacccatgtgtctacccagcttgtctctaagatgactgccatcaactctcccctcccgtgcacaccatggtgttcccctgttgagaagtcgaatctgctctttgaatctggactggttttactgacttgcttgacccataggatatagcagaagcaacatgctgaatttgtgaggttgaatcatgaggagtcttgcagtttcctcctgggcctctaggaacattactctgggggaattagtcatgtaaaaagtctcaccatcctggctggatgcggtgactcacgcctgtaattccagcactttgggaggctgatattgtttagctgtgtccccacccaaatctcatcttgaattctagctcccataattcccacgtgttgtgagagggacctggtgggaggtaattgaatcatgggggtgggtctttcccatgctgttcttgtgatagtgaataagtctcacaagatctgatagttttataaatgggagttcccctgtacatgctctcttgcctactgccacataagatgtgcctttgcttcttctttgtcttctgccataggcctccccagccatgtggaactgtgagtccattaaacctctttcctttataaattacccagtctcgggtatgtctttattagcagtattagaacagactaatatagaggctgaggtgggtggatcacttgaggtcaggagttcaagaccagtctggccattagtgaaaccccatccctactaaaaatacaaaaaaaaaaaaaaaaaaaattagccaggctttgtggcaggcacctgtaatcccagctacttgggaggctgaggcaggagaattgcttgaacctgggaggcagaggttgcagtgaaccgaggttgtgtgactgcactccagcctgggtgacagagcgagactccatctatctttttttttttttttttgagatggagtcttgcccttgttgcccaggctggagtacaatggcgcgatcttggctcactgcaacctgtgcctcctggcttcaagggattctcctgcctcagcctcccgagtggctgggattacaggcgcccaccaccacgcctggctacttttttgtatttttagtaaagacaagatttcaccatgttggccaggctggtcttgaactcctgtcctcaggtgatccatccgcctcggcctcccaaagtgctgggattacaggcatgagccaccgcacccagctgagactcaatcttaaaaaaaaaaggaaaaaaaaaaaagttcttgctatcctgagatcatcatgctatgagaatgcctgagctagccacaaggagaggctgcctggacaggaacaacggtttcagccaggccagcccaggctcaagatttgggagtgaaggggtctcaaagacattggagctccagcagacatcgcttggagaagactcaagacccagacagatggctccagtcgggctgccccagcatctccagccattgcaggcactctggctgaggccccagatgttgttgagcaggactgccacgcccagcccagatccctgacttacagaattgtgaacataataaatggatgttgttttatattttggggtggtttattacgcagcaagagataactggaacaccatgcgatgctgcagaaggctggttggaccctcattcagacaacaggaagatgacccatgagcccaggagctgtgatgaatgctgcttagccaggaggccaatcctggagccacccggtcccctggctgccctggctgtggggaagctcactgatcacagtgagcactaaggtgtcccatcccatctgctggctcaaaccactgtgctgcagtgaagtcagcaaaatcatgctctcatctccagttactacctcccttgggcataaattcaaactcatttagttttacttttattacctcacgtctctcgaatgctgtaacctggcctgtctccgaccttggctcttcctgtctcatataagctcattggaagatacttgctttggtctttctagcataagtcttttgagacacatttattacggcgattggtctggagtattgtctaccttacagagaccaccagtgaaagagagctgcatgtgtgtgcatgtgtgcacgtgtgtgtgtgtgtgtgtgtgcacacggggtgcaggtgtgagggttgattactgaaaacagcatactctgagccttggttttctcatcttaaaatggggataataccatacgcagtaccccctaactggattgttctgataatggctaataatattatttaaccaaatggcaataccggctagcatttattatttactatgtggccatgcaccatgctaagtgcttcaacatgggctctttaattcaatcctaaccgtatctgtatgccgtaggtctattacttccattttgcacatgagataattacgctcagaaaggttaaataacttgctcatgaagtcagcacccagacaaactgggatttgaatccagttgttctttctgagaggctatactcttcttgaccattacaccttaaaactatacataagataaaataaaaaaaattctgtaatctgttttaaaaagtttaaaaaacatgtgagccaattgagcttccaagtgactgacccatcttggctgtggtgaggtcacctactggcccattgcctgggtctcatgcccagtctggctgagaggcagcctccaggccgggggtgtacttcgtgactccacagagaccatcaacacaggaattcttcatctttggcttccccaagggtgaggtaaaagatacgaggcaactcccatcctcagtagtggctatttaggaagaagggtagggagtcccagtccaatggggaaaaacctcctggaaagcacaggaattcccctcttcccttcccttctcttctcttcttccccagggatttttcttttttcttttcttttcttttccttccttttttttttttttttttgagatagggtctcactctcttacctaggctggagtgcagtggtgtgatctcagcttactgccatctccacctcccgggttcaagtgattctcctgcctcagcctcctgagtggctgggattataggcgtgcacgcctggctaatttttttttttttttttatggcagagatggggtttcactgtgttggccaggctggtctcgagctcctggcctcaagtgatcctcctgcctgggcctcccaaagtgctagaattataggcatgaaccactgtgcccggcctgggattttgatctgcgaattaagaactgctacattagaggagcttaaggaaccactgtatcataaagataaatcctaaggcaatcaagggatgcaaactcacttttcttgtgcaagctgaagatatgcaggtcagcttatatttactgtggtttcttcaaggcaatcatggatattgaacatcaccacagatatttaccaagctccttccaagtgttaagggctgtgtccctggtgccagtcccatgcctagcctatagacaatgtccaggaagtgatcactgaatgacatgggggagtaaaagtgtccatcaagactctcattacatccagaggaggctcatggagagacaaagagatcttcctcgctgtcctcccgcatccttgtccccgaggctatacgcagcatattcatcggtctagtatgagaaaaattgcatcatagatggtgggcaatctgtcccctagaaaaagctctagccaccaaggtaattaatttattttaactggtacatcactaagatttttgtttcttagtttgaaaatctcttaggcacaagggttcactgatacatgtgcaaaaatattcattaaagtgtttaaatttttcattattagaggactgattaagtagaatactaggtagccatttaacatgaaaactggaggcgggtggattgcctgagctcaggagttcaagaccaccccgggcaacatggtgaaacgctgtctctactaaaatacaaaaaattagctgggcgtggtggtgcacatctgtaatcccagctactcggggggctgaggcaggagactcgcttgagcccaggaggtgaagattgcaatgagccgaggtcgcaccactgcattccagcctgggtgacagagtgagactccgtctaaaaataaataaataaaataaataaatcaataatgggttaaaagactacgtaaaaatatatgtatacatatacacatagataggatctgtatatatgcatagaaaatagcaatatggatcaaatgtgaatagtagttatcactgcgtattgagactggatgatttctatttttgtattttggaactttatttaaatgaggattaatgatgtttacagtcataaaataatctttccattttgataattaaaaacaagagaaagtcttttgcgtttaaaatagtcttattcttgctttttttttttgagacagggtcttgctctgttgtccaggctggagtgcagtggcacagtcatggctcacagaaagcttgacctcccaggctcacatgatcctctcacctcagcctctggagtagctgggaccacaggtaatgtgtcatcacacctggctgatttttgtatgttttttagagacagggtttcaacatgttgcccaggatggatcttattctttctgcatcaccttggggttctgagggtctcttcattctctggctgagagggctgggaactactttccagcaaaatctggaacctctctgcaggtgctgtcatggctcacctctatgtgccaggaagctgcccattcatttggcaaagaatcttgtttaggctcttcagttttcatactggatgccaattctaacatcttctcagtgagactttgaagtatcaagctcttcctttaagctgcaaccctaatacttctactccaagtgcggaattgaccctttaatggtccaacttctgccaagcccaagtgaaaaatgttgttacgtggatattaacttatagacatgcagtcaatccgctcttgtagctgtgcaaagtttgatctctgcacgaagtcaaactgcctatgaacttgaactgtattttatttcctttcataatgatgataaagcagtggcagcagcaactacacatgatattgcctactacatcctagggacgaggctaagtgccttctgtggattgtctaccccttacaacaccttacagaggaggaatgaccatcctcattttacgtgtgagaaactaaggatcagcgaaattgacaacttggccaagttcatacagcagagccaggattcaagtgcagatctgacttcagattagccagtgtttcatgccactgggctatcctaccttcattgctctcatgaatgtgctggtcttctgtgcctatttcattgaggcaccctctagaacaccatcttgtgttttggagattcactgtacaaatgttggtgaagacattattacacagtatcccctcatgggggcctaggacagaaagttccttcatacttaagtcttattaaaatactattttcggaagggaaggggtatacttttctttcaaagaaatatgcagcataaaattactgcatttccctttttgccttgacctccaggaagctcagagctaaaagctcagagctagagagagcccagctcccatacctttccacaactccatggtctgtatattgatgctacaacttttcccttgatatggagcttccttttagcctatattttccctaattcagatttgtgtgtatgtatatatatattttcagactactatacctattcatgtaggctgtcttcaatccgttatggaatgaggcatggtagaaacactgtccatttgttcacttagatatttattccaggacttactttgttgaatgcattgctgcccaaatggctgacaaggtatgtcaggcataaagcttcatctcatctggcgaatatgacgaaggagtaaggaatctgaggaggaggccatccagggaggaaaggccctcctgacccaggctgggaggctgctctttctgagtggaccattttgacctgccttgcagtgctttgcattaccattagaaacacaatggccacattttcatgactggaatggaatgaacaaatgtattcattccatagcatcagagagctgcaggcccagacaggggtcagcagaagctcacccacaccatgaagagggcacagatgcagacacgttcaagggaagggctgtgtctgtatgtgggagtccagggcagaaaagcttgggtgtcataaagtaccttgagatgtctgattgaaaagtgtctatcagtgaatagaggccataaacagagtccctggatcacctgcataggccagctccaccatgggctacctacctacagcacctattgccactgagaagtgggtgtggtccaggtgacctattggtccctttccaccctgggagtttcaggattctctgattagaaggggctatcttttacccagtcaactacagattcagtttagagatgcacgcacagttgatgctgtgctaaacagtggcatgttacccagaggccagactgcagggctccataacccaccagctagagctcagagaggcagtcaccaccaacgggctgcccttcatctcagaaaacaccttcattccagcaatcacccctaaatgctattccaaatggccaagcatttcatctattacaaaatggatttgttcttggcaatacatgcgtttgccatctcccacctttgcctggtgagttactgcttatccttgaagactcacctcgggcatcatatctccagaagccttctttgaatctcctttcctgtcctcccaaccctggctaagttaggtgcccctcctctgcggtgccacaataccttgggcacagccctacttaccacgtggtatttattatgattttctccttatagggctgattcccccagttgactgagctccttgagggctctggtctcactgggctttgcatctctagggcttagaataggtcaggtgctcaagaaatgtttgttggctaaacacaaaaaggaagttgcctggtaggtccctaagataagggaacttgcaccttaaggttaagaaaagggggaatatggatggccagagccaattccttccttctgtcttctctcccacaggcagacctgaagaacaaaagctagacaagtgcagataatgccacagggggcctgaagacacaagaaggtttttttcaatctgggttctcagtggggtctccagaaagaagcgacatttctttttaggctatattttgcttgtacttgtttttttaagacctggggtaagcctggtctacaacttgcttcacccacgtccggaggcaaaaataacttcgagaatattctgggcatattcacagacttcattgacatctctttagctctacctatagttagttctctcaagtaccagccagaaattagtcttcatagattgtacagaaataaatagtgcccaatcatagccttcagcatttagaaacaaatattagcaattctgctaagatgtctatctggggcaagatgacaaatcaactggccaaaatgcaggtagcttctttagggctaattttggctaactaaaagagccacgagattcctttatctccctaattataacaggggcagatgtagaaaattttgaaaatactaagaataaaggaaaaaataaaattcagctgtgaaattccactgttgggatatggctactgctaacatcttggtgcattttctttttatatttgtatatacacccaaatactttcatttcctatatgaatatttaaatatgaatttaaaaactagaatactttatgagtctaaaatcataacatattttatgtgcagtctcataagttccttttttgcgcaacattatctcatagttggtcttcgcatgccattacacgttcttcaaaaaccagatttttaaagggggtgagcgttccactgtatctgctgaggtttaactttatgcctcaccccaagtataggaggttgggccttactttgttaaaccacaacttgctttcttatattaatagcattccaggttccctgtggatgtcatgcactgcagcccaacacactggtcacctgtcttcatggaaccacagcctaaggtggctggccagcagccctgtcacacccatccagagggactggcctgcctgggaggaagaaacatgcaatctttatcctgtaacttggccagggtttgtgcaaaggtggtacaggaggaagaaatgccagatttcaacctctcccctgctcctcaaaagaaaaagctccagtggaagctgtagggaactcttcactaactttttgtttttttcaagacagggtctcactgtgttacccaggctggagtgcagtggcacgatctcagctcactgcaaccttcgcctcctgggttcaagcaattctccagcctcagtctcctgagtagctgggattacaggtgcctgccaccgtgcctggctaattttttgcatttttagtagagatagggtttcaccatgttggccaggctggtcacaaactcccaacctcaagtgatccgcccgcctcagcctcctaaagtgctgggattacaggcgtgagccaccgcgcctggcttcttcactaacttgtgaggcattggacatgggtcactcaccagattcaaaccttttaaatttgaacccttgttgtttaaatctttctcaaatggatatgcctgtttccttggtttagtcagcacagcaaatataaatggcttttcctttacttattgcagatgcctacctgataccctgagttcactattctaaattgaattaatgagttgccgtgcctccaaaccgaccacgtgttcactcacacagactaagtgttcagcttccaacctgcgcgtccctcctcttggagagcccaccctgctggctgctggtgcagtgcccgggtggcatggatctgattctgttgtaactatttgcttgtgtcccttcatctcctgctggaccatgagctcctggagagcagggatgtgtgtctaatgcatggcaggcactctatcaatacaggaatgcattttatgtggaatctgacttttttcctcagatgtggaagcacgcagcaacaaacatatgtcgtgaatcaaaaaccgggacataaagcctcacacagggtctgacaagaatataagcatcactattaactgcttctgctattctctgtgtcctcggcagctaagagttattgaataccatgtgctggaaatgcgtatgtgtcaccttgtttaatccttgcaatcaccataggaggtgtcctattataatctctattttacagattaggaaactgaagactagaggcattcttttttattttttgagtcagagtcttgctcagtcacccaggctggagtgcagtggcaccatcttggctcactgcaacctctgcctcctggttcaagtgattctcatgcctcagcctcccaagtagctgggattacaggtgtgtaccaccacgcctggctaatttttgtatttttagtagagatggggtttcaccatgctggtctggccagtcttgaactcctgagctcaggagatccacctgcctcagcatcccaaagtgctgagattacaggtgtaagccactgcacctggcctttatttttctgagacagagtctcatcctgtcacccaggctagagtgcagtggtgcgatctctgctcactgtactcactgtaacctccgcctcccaggttcgagtgattctcctgtctcagccttaggttcaagcagttctcctgcctcagcctcccaagtagctgggattacaggtgtgcaccaccatgccaggctaatttttgtatctttagtagagacagggttttaccatgttggccaggctagtctgggactcttgaccttaggtgatccgcctgccttggtttcccaaatgctgggattacaggcatgagccatcgtgcctggcccatggcattctcgcccaaactatgaagctaagagtgcagatctgggattcaaaaccagactgattctaaaggccaccccctgatcatgacacttgactgccagttatttagaagtggggggtgcaacaaatacatgcataaatgctgcaaagcaatctgtgaaaacaatttcagaatgtctggtttctaacttcacaaaaaatgggattaatttaaggcactgaaaactttgtctccccacccccaaaatagggatgagaagatctctgaatatccaaccacctttgtctttgtggcctggttagttctcagtgatttatgccaatggagaggagatctggataaatgaaacccagcactgttaatttatctattcttttttgggaggtggtggtgttagtgtagaaggaccattggaatgcgatgctgtcttttttattccatcagggccatttgctcctcttaggagctgcgtccttcctgcagctgacttgctggtgagtttcagctggctggacagggccagggaacggcttctcttttacctgtaggttgccactttgtatgcagaagagtaaccagggaaagtgttcgagttcaatttttaagggctctatgcattgtgacattttcttatattgccatttcttttcacagtatcacagtcaaataggttgaagtctattttcaggtggagaaaatgagaaacagaatgagagagatcacccgcctccatgatattaattcaattgtcagaggtgaactaacatcaataatagcaagagttcttttgcatctttaagttctcactttgtgggacaatctctgcaacataagccataaatatttttcttcagggacctcaaactactccatggaagtaatctcggcatttaaaaaagcactcaagaatttaaatttttctttcctttttttttgagacagagtcttgttctgttgcctaggctggagtgcagtggtgcaatcacagctcagtgtctcctaggcccaagagatcctcccacctcagcctcccgagtagctggcactacatgtgtgtgccaccatgcctggctattatttattaatttttttttttttttttgcagacatggggttgccctatgttgcccaggctggtcttgaactcctggagtcaagtgatcctcctgcctcagcctcccaaagtgctggggattacaggcatgagctactgtgcccagccaggaatttaaattttattaaactgatgagaaaaccaacaagcaaactcatagcagagccaaagttggaagtggtgtaggtatcactgatcacgaccacgtggttgatgctagtgtttttcttgccccacactttggctggctttgtgcatatggatgggagagtactacagaaggtgatcacacagtcggatgaccatgttttcctgcgttttgtcacttctgtttctccagcttagatcctcacatggcccacattcagccaagaaagcacagggaagagggagctccgtctcccacacgtcccacccaccctgcaccacgtcttcaacattctctacgcactcctgagaccgtctcagcctcgccatgtgctgcacaccgaggagcacaggatttgggagttgcaagtgaaaaatgagcatggttaaaaatatcaaagactgcaaacatattcttttcagaggagtgagaattagcaagggtctggcagcaaagccatggcttttaatgctattaaaaaggaagaacaccttttaacatttaaaactattgaatgaggctcttctcagatatttgatacaaatctgatactcccatggagaatgcatcaaaatctttctatgttgacttacatcaactctctattactgagaaatctagagtaactaagcaaataaaatacagaagacaacagttttgaaattaccttggttgtctctctctctcacctatagtggccttttgaggacgatcacttcagcctcgggatctggtggccactgaaatacccattccctctctggcagtcccatttgtgtagaattctctccactcatttaagagcagaggagagaaaagctgagtccatttttaactctcacaactcctagtctcataacacatccttcttttctgctcaccctacagttccctcttccccaagttctcactgcccagaaggtggagtttggggaagcttttgttctacagtgggtgagatgtgtttcaggcctagcaagttagggatatgattagaaatcagctatgacaacaacgagagcatagactccagaatacagagcaggcttggtgcttgcttgtgtgtatatattggcttttttcttgacaaccctaattctgttttgctctagtctttttattttcatctccccatcatttaaaactgaaaatatcacaagctgaatttatggtagattccaagcaacaaaagcaggcttagagatcatcaaatgtaacattttccaaaatgtgttctgcagaaggccacccctgtggggtgctctctaaaaaaaaaaaaaaaaaaaaaaaaaaggccgggcacggtggctcatgcctgtaatcccagcactttgggaggccgaggcgggcggatcacaaggtcgggagatcgggaccatcttggctaacatggtgaaacccggtctctactaaaaatacaaaaaattagccgggcgtgctggcgggtgcctgtagtcccagctgctcaggaggctgaggcaggagaatggcgtgaacccgggaggcggagcttgcagtgagcagagatcgtgccactgcactccagcttgggcgacagagcgagactccatctcaaaaaaaaaaaaaaaaaaatggctaccatggccaaataagcttaagaagccccgcacactccacccccgcctcacatctgagcacattcagggccctgcagagtcccatagtacgtaaactatgttaagctcacatcctagcttctgtagggggggctccaggcctcctttctcggactacaatttctatgagaaaatgctctgaacttcaaatctaactgtccataaactggaaacttcctagacatcactgaattttcttgatgatatcagataaaaacatgggatatgtgataacagtacataaaaacatgtgacccataaaaggtctttaaggtccaaaaagcagtaacttcacaattaaaaatgtatacatacttatttagctaaaaggttaaatgtgtatttgaggtattatagggtcttctttactttttttttttttttttttttttttttttgccatttggggcagcccaggggactgattcatatcaaaagaattttaagccttcaagactggactggtattgaactgccctacataaggatacaaaatccatgctcaaagaagctttttttagtgcaagtgaagcttgttgcatctcagaattgctcaaagtcccaggtcaagggtggtggcctttgttactaattttgaggtttgacaaactgttcacctggagaagattaaaatggaggatctgtgtaagatgaaagtcctttggagctggtatgagaatcctaagctagtaatgtttacattaaatcaaacatctggatgaaaagataaatgttaaggcaattctctacatgtttttctaagtgtatcagggatataacgttcatcataaaactaaacagttgactatttcttcccccaacatttcacctcagtattctggtgatatatatatatcacacacacgtatagctaataaactcaagggggcagatagtccacagaaaccagttttagtttcatgtggaaaaatactttagatactctgatgaaggcaaattatatattaccttaaaaaccaattttattgaaagaaatgctgcaatacttaggaaaaaggtggcgttcatcctgaaaagtatcagaatattcatgttgatgttcaatgcaaacacggtctagaggcagcaagctctgtggagtcaatgttttctttctgctatttctattttaatgtttatttattgctttcactttttcaatcctttcgtaatggcagtaggaaaactttggaagataaatacacatctgacaaacctatcttatgtcttttagcagaaaaagggtcaggctgttaactgacgtcagcaggcagggagagggaggaggtgaaggaacaaatgctgaacacctgttatttatgaagcactctacatatgttctttcatttcactcctggtgaaaacctgcaaggtagaaactcttgtctctgttctctagctatgaaaattaggactgggaaaagtccagcaacttctctaagaccagagagtagagagatagctgatttgggatgtgaactttggtattccgttctttctatgacatcaatccaacccctatagagaaaggtatttcacataaaccaaaatagatgtgaacaggatgaaatttgactgtataaagaaacaatcaaattttacaagaattgcaagttatgtttaaggcaccagaaacctaacactgcacatccttgtaaaccctgaatgaaatggctttaatcaacactttaatcccgtgcaaacaaacgcttcctgagatatttagagcagtctcgcagggctttgctttgcagtctttactgttaccacagactacttttatatcactctcctcaagcctccccaaatggaagggtttgtttttttttttaaaggcccatgatcattctttcccattttcaatctttctttaaaaaccaaaaggggtgaggaacatgtagcatgatacaaatgctctgagcatgaactgcctgactcacggaccttaagctggtatagattttggattacagttggccttggcctataggtgttcatcagaactggaaaacattgcttcaggcagtcttctacccatgacattgaactgggggctggcctctcacgaatatatgaatacgtgattcctgattctttaaatatgtatatttcaaacccagtgagcagagcagaatcatcaaacttaagtggcattttcaaattcttctgattataaattattaatatactatatcagagatatcctcaagcaatttgtaccaccttgagggcatatcaatcttaaagaaacatttgttatttcctttaattgtttccattttccaagtttgtaatatatgagctagtcttttaggtttaatgacaagtatggctataaatggaagtggtgtaatcccataaggatgtcattacaagaccaactttttttttgagtgacggtttcactctgtagtccaggctggaatgcagtggcacgatcatagctcagtgaagcctcagtgtcctgggctcaagggattctctcatcagcctcctgagcaactgggactacaggtgtacaccaccatgtctggctaatttttttttttttttttaatagggacaaagtctcactatgttgcacaggctggtcttgaactcctgaactcaagtggtcctctcaacttggcatcccaaagtactgggattataggtatgagctgtgcctggccaagagtaactttttttaaaaattgagacagggtctcactctgtcacctgggctagatggcagtggtgtgatcacagcttactgcagcctcgacctcccaggctcaggtaatcctcccacctcaccctctcaggtagctgggactacaggcatgtgctatcacacccagctaatttttgtttgtttgtttttgtagagatggggtttcatcatgtttctcaggctcatcttcaactcctgagctcaagtgatctgcccacctcggcctccaaaagtgctgggatttcaggtgtgagccactgagcccagccaagactaatttctgaatgagcatatgggccaaatcttggagttcccaattaccacctgtaggtatctgatctgactcctattcaatatagaagactgcagatttgtatgaggcaaacacacctattatgccctagtacttagaaatggctactagagaaactgacagacatagtgagggacaaggaggctgtaagacctttactatgttttggtgccagagaaacaaagggatttctcaagtctgaaagtgaaattagtaaatgagtaatggcagttgagatactaggtagggctggcattctaagttgaatggaagaatgaaaatatcgaaaaatctccaaacagcctagtctgccaaaatgtacttggtgttatgagtggaactgtgacccacccaaaattcatatgttgaaggcttaacatgcagtaccttaaaatgtggctgtatttgaagatagtgccctgaaagtggtgattcagttaaaatgaggtcattggggtgggccctgatgcaatctgactggtgtccttacaagaagaggaaatttggacccagacatctaagcacagaggaaaggcgatgtgaggacacagcaagtacgcagctgtattagtcagttctcacgctgctaataaagacgtacccaagactaggtaatttataaaggaaaggggtttaattggctcacagttccacatggctggggaggcctcacaatcatagcaaaaggtgaatgaagagcaaagccatgtcttacatggcggcaggcaagagagagcttgtgcaggggaactcccatttataaaaccatcagatcttgcgacacttactcactatcatgagaatagcacaggaaagacccacccccacgattcaattacctcccactgggttcctcccatgacacatgggaattatgggagctacaattcaaggtgagatttgggtagggacacagccaaaccatatcagccgccatctacaaggcagggagagaggcctcagaagaaaccaaacctgccgacacattggtcttacacttctggcccccagaagctgtgagaaaatgaatttctgccatttaagcctctcggtctgtggtactttgttatggcagccctagcaaacaaatacacttggtatgtatcttaataccgggtaaacaagccaagctagtgtgttaattataagttgggctttcaatacagtccaggcccattctgcaaagtctttaatctgttgaaagggggtgggtactcaccacatcaaaggcagtaaacacatgacagtagtggtgattagacttcaaatcttttgtgatataggcaaatgttgagaggtcttctgggtcctgggcagcacaggagatattacgaatttcatgctcagcaattatgttctggaagaaatgacataaatgatcattgttttcctctgcgaaccagcatatatgacaaccaagacaagtaacccaggaagcagttgctttccttctttctggagtgttctagactagcaacactcaaagtggtccactatattatttgtgggtaaatgaataccagatatggaagaaatattttcatttaattaaaaacaacctaacacagtcatatcctggagctgcagttctcaccagttgctgtgcatagaagcagtctgggtggcggccactttttttttgtttgtttgagacaagagtctcactctgttgctcaggctgaagtgcagtggtgcaatctcggctcactgcagcctcccgctcccaggttcaagcaattctcctgcctcagcctcccgaatagctgggactacaggtgcatgccaccaggcctggctaatttttgtatttttagtagagacggggtttacaccatgttggccaggctggtcttgaactcctgacctcaggtgatctgcccacctcggcctcccaaagtgctgggattacaggcgtgagtcaccgcgtccggcctccactttaaaaaataatagtaattactaagcatttgactgtttccattccccatgtccacctgtagctgtgcagcactgctttctgctaattctgtatggaggggagcatctgtcgctttctctgtatgagaagagatctgacccaatgaggctcttcaaatccctcgccatcatgcttgcacgttgttcttgtgtcctgctcctcctccctcagagcaagggcaggtactgaaggaagcaggcaggtggaagcctcaaggtgctttctccgtggaaactaaggtgcaggggcctgataagagaaacaccatactgcaagattcaggccttggatgccttgcttgatctgggccctgtggctatattaacaacactttcctaactacatccactgtgtataattaggaggtggtgctgttgctaccattatttacaggtgaagcaactggtactcaaagaatttaagtgccttatgcagagcaggtgctggggtggaactgaaatttggggttgtctgactgtggagctcaggctctttgaaatgcattgcaatgcccttcaacgtctccacctccctcttactggcttaacaagaattgagttatttcttctctagcatctctttgtgccttcttccctggtgggagaaaggtttaagtaccattgtcctgaagcacaaaataaccacgaagcagcttggctgcaaaccctgctagaaacttcttttgatacatagatgtgtttaaaaagaaaaaaagaaaaaaattcacataatcttgcaatcattttcttatcttataatatcccatttatgtttttttgcagttgtcacagatctaaaaccctcgatgctttagttactctaattactttttaattgcgctgtcttaaataacctgttggcaatacagtgttccgtgtacagccatcaatgcctaaaaatgcttacaaaatgtccttccctgccagcacccccagcaagtacttcatgtccctcactttaccaagctgagtggttcggaggcaattacagaattaactcacaaaagaaaattaaattaagacatttttcaccgtggccttttgtgttgacattaatgcagtgctctgtcaaaaaataactcaaattgcaattggaatcccataaacaagtaacattctattgcaagataagtttcagactagaaggtgatgatcctcttctggcatccagatagcattccttcaagtagaaaaccaaattagggatgggtgagtcttaaaataatgttaaaatgagaaaaaggtgcaatgtgagatggtgtgggaacctctgccattatcttgattgggggcagccaatgccctgggaagcctgggtggatttggtctcacttgtccaggaggcactgtcacaggaaataggtgcttcaacttttactaagttggcattttgtgttcttgagatcttttgcaagatctcaaggtagatgcacttcttgggaaatgaaaagtgctctgtgatttttattgcactgaactctctgaatcttgccaactcatgggatgccactcttgacaatttccaatggtgcacggcagcactgtggcctgggggaaagttgcaaaggaggaaaagtatatctttggtactctctcctcctgtgtctttgctgacccctgaattttctggagccctcttcttctctttctctctctctctcttttttttgagatagggtcttgctctgttgcccaggctggagtgcagtggcaccatctcagctcactgcaacttctcaggctcaagcaatcctcccacctcagcctcctgagtagctgggactacaggcatgcaccaccagcctggcttattttctgtattttttttttttggtagagaaggggctttgccatgtttcccaggttggtctccaactcttgggctcaagcaatccacttgcttcagcctcccagagtgctgggattacaggtgtgagccactgtgcctggcccagccctcctgttctctattccccaggagcccaggactgtcttttagctgcccagggaggcctgacctctgtgatactccatgttccaaaatcagccttctccccgactgtggaaacttctactactctgttcccattgtctaagctataaggaaagctcatgctagttaaaatattctatattcaggtaggaataactcatcattgtggtcatcctaactggcgcttaaaagatgctcttgaatttgtattgatagcctgcggaggcaggtatttttgaacagacctttgtgatatattgccaatgctagaatggggtaaggtcctgggatgtcactactgaaatactgccatcactctgcattgtctacctgtgcagaatggtgaagccagttctctatgtgcaggacgaatcaaaggtcaaggatactacagttgtagactgtatggagactagatggtagacttcctccttggagaagaagccaaagaggaacacattctttccaccttgtgtcatgcatttatgagtggcttttccacaaattaaaaagtgatgtcatgaagaggtacaggtgatgcacctcagttgaaaactggactcctcacatgttgatcagtctccatttctaagcacattttaagaaggccagagctttaaaaggctcaagagaagaactggggaggggctcctcctgcctcttcttggggatagaaattctggcagcatagcacccttcaatagggagagatggttttgcctgtctgttgtttgccatcatggtgagaaacagctgaagaggtgtcttgctggtaggggtaggacaggattctcgggtccagctaactcatatggtggttctgagaagggcgcgtggtgatgaagtgatgcagcttagaaatctgcctctcgccactgcattcaatctgagccccgacaggtgggacctttctcttgcatctcctcatcagccgggcttttcctgagtgaggagactgcagtgttccctccagggcggggccaacagtatagacctagagctaactggtgatgccctgtggggcacgtgatgctgagaacagcacatgtgcttaacatggccttaatttgtctccaagcttcttaggagtatttgctataaaaaaaaacaatgggaggcccactgcagtgactcatgtctgtaattccagtgctttgggaagctgaggcagaaatattgcttgaagcaaggagtttaagaccagcctaggcaatatagcgagatcccatcactccaaaaaaacttaaataattagccaggcttggtggtgcatacctgtagtctcagctgctctggaggctgaggttgggggatcacttgagcccaggagtttgaggttacagtgagccgtggtggcgccactacactccagcctgggcaacagagtgagaccctgtctcttaaaaacaaaacaaaacaaaaaaacccccaaacaacaggcacttgtttaggcaaatgttccaaagtattttgtgcccctaaaatagcataggccttgtttaaaattggcattccaaaaaaatttttaaaaactcaaaaaacaaaacaacaatgaaagcaaaaaacaaaccctggcactgcatcatttttaatttagccagatgggaaggctgaggagggagtcagcacaggaaggcaaaatgcaacctgctcctcagctgagcactgaatgtagaaaccgtgtctcctctcggaagacctccctccccgactcccccaacctgaagaagggtccgttactaaacagttgcagtcccccaggccgaattccctgctagagcaacctttgggctattgatcaacagaaggctgaggtgatttatctaaaacactttagtgctaaatctattgcaagttccacttttaattcaagatcgctttctgcttcctccttcttaaatcaggattagtgattcaattcatttcctaagttgctaggcaatacatttatgagtttataactaggcctctaaccctttcccatgaattcagccaaacccatttatttattataatcaaaggaaagaaatgcttcacggagggttaatctttcacaaagtctaatgggggctaataggaagggaagagtaattaacacacaatgaattatcacacaatgaattagtttgcacttcaaactaatttgtggaaggtagctgtggagtaacagaaaaagcattaggttagggaggttgaaaatcaagttttagtcgttcttcacgaccaacaggctgtgtgactgcagggcagcactgagccaagggactgaggccttcaggtctccagctgcccagggcagattaaacaatcacctctctgaccaaggcaggggtacgagatgcaaggttaggagagtactgttgaagaataaagtacgatgaaaacataaaatatgaacagtaggctgggcgtggtggctcatgcctgtaatcccagcactttgggaggctgaggcggatgattacctgaggtcaggagttcgagaccagcctggccaacatggcgaaatcccatctctactaaaaatacaaaaattagccgggcatggtggcacacacctgtaatcccagctactcgggaggctgaggcatgagaatcgcttgaattccaggcctagtggcctctagtacctgaaatggtgagatctttaaatatgcttgcatattaaaagttctttgcttcaaatcaaagtggcccactgacacagcactgcccagtgggggaaatccctggtgaaaacagaaagcaggactctggagtttatcaatctgctccttttctgctgtgctctttgctctagaacaaagtagcatacacaggtgtcctcgcacacactgctagaatctaggtatctgggcatggttcctttcacaccacaacttgaggatgatccttcaactgtggatcctccgtcccttctgaagccagtcctcccaccctggctgatggtagtatttctcagtcttacccagtcaaactccaccaatacggccttccactattttctttcttctaacctgctaaacacaatctctctacttgggctccctacacagcaactactagactattgccctgagtcacccacactctccctacccactgtcatactgggggagatcagctaccttgcaggtcactgggatgtggaccctgtatagccagttgaaattaacatccttcagttccttaaaaagccaggcacatgttgtcatacattcacagactggctccacttgccaccaacataggcactttgcctttgctctagattctgaaaatatgttgaggaccacactgcaaagacttgaaaaaatatgctgaccttctttatttagcatctttatttacatagaattatcttttgcatatctttctgtgcttttgcttccaagagtagtcatcagtgagcagaggtttatggttaactcatctaattattggcaattgaagtagaagtatctccttgaggcacaggagcatcaacttctgtgtctcttgccgtgtcagtaagcaacatacaatggaaccggcagagctctctttcattcctctgattgtggagagtgggttagagaaaatgctattaatacagctgcatccagccatacccccaaaatcatgaaatgattgccttaggactgtaggaacttctcagggcaaataccacttgtttagaaattgtcagaatccaagtctgctaaagttgttcatctaagagagtgtcaaattcatccactgaaaatatactgctattcaagctttccaagcataaatgggatagagggagttgtttcaatttagggaaaaaaaaatccaggtgccaaagtctttcttaagatttagatacagcaatagcaatggtatctttgccattctataatgtgttccataaagtgttagaacttttaaaaccaactgactataatttaaggataaagtaattttatataccaggaactaaagatgcttccaagaaataaaaaagcaaatcaatcagcattgttcttatttgagtctccacaattattatctgtcaacaaccatcaacaatattttgcacagttggaatcaccattatgctgatattattggtcagcatgatgctgggttatatgctttttgcctgggtttcagaactttttctataaccgggaggttgttttcccaagcagatttggggaacttgggtttacctaactactgaaacaacaatctctttcgtcacagaaaaccaattggaaaaacttccgattcagatgctggggtttaatagagacaccaaagagtcactgcccgtgagacttttccctggaacctaaatccagttgccttggccctaagttgctgtttcttaagttcacctgtttcatgacttctgttccctttctccaaaacggagggggtccaggtgggaggtctgggtgagaggtccagagaaagaccagcattcaccaatggtgatcacctcttttaccctccttctgtacttgattagttgaaaggatgcaggaataaaacacatgaacgtttggggttttgtgaggaggagtcagtcagctttgagtttatggagagggacaatggtcacacccaagctttctacttcagcaccacgatgctgttgtctttgtcaagaaaggaatgctttttcagtaaaatgcaaccccactgaccacgcttgacatcacagcccacaaactattcccactgtgaggaagaagtcacagcggagccacagcatggcctgggctcttttctgattgtgtctcttaagaaaacagtacagctgaaactctctcccatctcagaggctgggaattaaatgtagttataaaattaaaaagtcagaaaattatcaacagaaaagacacatatatatctctagataaacagaaagacaaatgttctagccctttatctagtaacatctcctctgatggaggagtgatgacattgttgacttttcaatctacaagtgatttttgttttctgtttcaatgttctccagatccaaagggacatgctggataataagtggccacagtctattagagaaagcatcatgacaaagtgaaagcacaatatttatagaaaccccagatcaagcccttcccccaaatggttcctttctgtatgtatgaaggtgtgtatgtgtgtgtgtacatgagcgtgtatctataggtatatgtaggaagcatgaaggttgggggaaagggatgattacagtggggagtgctgggtattataggaagcaaaggattttagatcatacactcaggactgcatctggtgtctaaaccagagagaggagtggtacttaccttatttgttgcatcaataaatttgactcctttatatgagacagaaagaataatagtagggaccttcttcatttgctctgtagacttctgaaattaaaattagaaagctgttagagcagtttgtgttgcgtggcaactgaagcacacaatttttcctcctgaaagataaagatgagctcaaattaaaaacaacaacaacacacacacacacacacacacacacacatcagatacacaccacgcacactctaattttaatgtctgcctctcctctcttgggcttagctatacttcgggcttataaagttatccgtcttgcccttgaggatctaaaaagagtttgttccgctactttgtgtggatgaaggagtacttcttttccctgacactaaagggtgaatgaagaggtctgtctcctactgcaatttcaagtgactgttcctttcacaagagttaaaccacatcggacttaactccaagggtgcatttgacattaacaaaatatatgcacccccccttttcctagttaccttcattcttccaggcacagataatgcttggatgtatacttaaaatagggatgtaaaagatatcactatgtattgttcttgaactggaccaaatccataaatgctgatattatatttacagcagaatcacttgtgaccacaagggatgtaatgatgctctagaacaatgaagccctccaggagcagtctgggttttgagccacagcaaaatgctggacagcccaggtaacctactttatcatttagagctgctacattcccttaggccaagttcttgtgatagatgttcacactggctgaatgtgcttagagtttgcagcttgtacagttttatgcatctgcaaaaagtttctctataatttagtatgtgcctttcctgtttagctttatcattcatcaccagtcaccagcagtcagtttacttcattgccctctatatatactagtaataatcacactaaacatcaagaagaacctacctgacagttagcctggtggattttccagttaagacagatgggaacataataggagagaaaacatataaaaggtgagagagaggaaaccatttcaataattcaccaacagtgtaaattcattaaaaaacaaaagatgccacaaaagaacaggcttcagagtcatcaaagatgcagtgccactgttattttagaaatgctgcaggctttcaccggcccctttctttctctgtttctcatcattctgtttactgcaccgcacagtcttaggactgacacacaagaaccttccactttgagctttcaacaactagttgtcttatgtctattaagggaatcaggaaaaaatagaaactttcttgatttattcatttatatttcccaattttctagttttaaattctggaatgcagccagaattcaggaaggcttttaattggatagtgtgagtgaaactcattgaactcaatgatgagacttcaattgcatcttttagttgagctgtgaaaaggggtgtttcacattttcctgattgttttggcacaacatctttttgagagttactacgcctgtttcaaaaacaatggcttactaaaagtattgttatttaatatctgttgttgtatacaggatgtgaaaaagcagctctcttgctttttaaccagttttgaaattccctggatgcatcagtgttcctttgtgattgccaaaaagagagattatgaaaataaaatataaggttagaaactcgttttaatgcttcttccaaccacttcttaaaaatgtgcaagacacatcaaaggcaggctagaagaaatcatgtgcaatgtgttgattttaaggcaacgcggtggctgaactctgtaaagagggagggctggggcagcccaggcgatagttggaataactgaatgcatatgtgaaaaattttctgcaaagcgtcacagtggatttcggtaaatcacctcacttatcttttgccatgaatccattctcctggacagatctatctgtaatgcaaagcaatatacagctaatattcagatgaaaatctattcgttatttgttcagcaatcgagttgttactttaggcaacccactgtgcttgtcactggaaaagctcgagtctagttcagggatggcagacagacctcaaactgtgtgcaaacaccagtctgctgaaagcactgtgttgagaaagattctgagctgtgtctgagctcagtagaaaagagggctggaaatgatgtctgccatgggagaagaagaggacgaggcggcccaggggctacacatgaacatgcctgctaggtctgataggaagaacagctacaattacaatgttgacaaatgtgacaggagcaatatgaacaacatgcctccaggatagtgaataaaaacagccttattttgcttgacagagtggggccagtcttcattcattcattcaaaagacaatgacggcctattaggggtgattgagctgactcttgatgaataagcattttccaagtagcaaagaggccaaaagaggctgttttagcaacagaactaatacatgcacagaggcctagaaatgagaatgtggtgggtttgggtaactggtggagatgagagtggtagagtaggtttggaaggttgtgacttactctgccaagttagggtccgttggaagcttttcactagagagtgacacaatcagacctgtgttgcagaaagattcttctggtggttgtttatgaaggagggactggaagagctagaggctggatgcagggagtcaggaagttattgtgcaaatccaaaggagagagagaccctaagcacctgagttgaagtagaggcattggagaacaggaggaggcaccacaatgtcgatgaggaagaactgagaggttctgttgattgatctgctatggaagatgaatgggtgggaggattccacagatgaagaagccactgagataaggaatactggaggggaaagtgtttttgcgtaagcataatggaaatgcttttgcacatgctcagtttgataagcaggtggagatatccagtaggaaatgagaatcagatctggaaatccacctacatacatggatggccaaggaggtgggagtggacaaggtggtttaaggagtgaacaagaaaagagggaaggacacacttcaggggaagatgaaatcccaaggggtggggcagaaacaagagctaatgaaggaactggaattgaagttggaagatgcctacaacacagtatcacagaagccaaagaggagagggcttagaaggtaggagcaatgccccatgccatgaggactaacaaggcctaaaatggtgtgcctaccacagtggctggctcacacaggagctgctactttcattgggcttactgggtggaattcctggcttttgcaacaagaaaaaattgttgctgatttcattaagagtagcttcaagaaaatggtggcagcagctggagaggagaacacagtgagctgtgcaatggatgccagttaaaggaagcagaaagctggaacaacaggcaggtcaggacacagctcttgagctgacatgaaggcatcagcggtggttcctgtgatggtacaaagatcccacatcagatgctcggccaagttgaacaaaaaaaagaaaagatgaaggatagtcatttctttttcttccatgggtcccaggaatctctgctctcctaactggaggcagcactatggtgtcagtgatgcaggctgtgcacaggcctctatgaatggcagtgttgggggtggccatgctttccaatctggagcccaaactgtactgctctctccactgagtcatttgacaagaagctgatggatcctgaccagccagagagttcaaagggagggtgggaaatcttctgggtagagcccctccttgaaggcatttatacaccctacaaaagataaggatccatcgtcttttaaaggggttttctgatggtgtactttgacaagagtttccaaagaggtcttttcatacataatcttagcaaaagatgaaaatgcatagaaagaaggcaaagaggctaggcatggtggctcatgcctgtattcccagcactttgggaggctgaggtgagcagatcaccagaggtcaggagtttgagacaagcctggccaacatggcaaaaccccgtctctactaaaaataaataaattaaccaggcatggtggtgggtggctgtaatcccagctattcaggaggccgaggcagtagaatcacttgaacccaggaggcagagattctagtgagccaagatcgcgccactgcactccagcctgggcaacagagtgagactccgtctcaaaaaaaagaaaaagaaaaaggaaaaaaaaggcaaagatcaaagttattgagtcttcagggagtctaatctgggaggcaagaaatctagtaagtgcccacttcatttcatgaaggctttacaggcatcaaaatgtgagcacggggcttcagtccaatcacaggcagtcaaagtccctccttccccattttctcttcggtgttatgatcatcattcttttctccttcccagggacgaaggcgcctactctgaacatcaagttactgagcacgtgctctcaggcaacactggtttctatgacctatctatctgcatgctctgctgggtgtctgtataattaatactcccatatgtttctgttaaaaattcaagctttattgatttgtataaacagaactctgtacttcaggcccatttccccagtgaaagatgctcaaggcgaaccttctgttatcgttttctttcgtttctagttgcttttccctatgccatgctctttgtggcatttttcaggtttcccaatgttctcaaatttaccccccttcagagccagctttacagaagagactaatttgtaatggagacctctgagtacataagcagataaatactcctgggtaaggctccaaattattttaatttttacagcatcttggtcacctgcaaaaagcattatagtgatattcaaatgtattttgttcacaatttcccaaattaagaggatcatacttttatttttccaagagaaatgatatttagttatatagagatgttacgtttctgaaatctaaaatacaatgcaacatttgaatcctaaattcaaaggcagtcttctctttaagcacttgagtttatattgtctataaccattaaacagaaacaggaatcagaatttcatatctggaggtggccacctgaaatattgttcttagtaagtcactgaatgcttttagagcatttttaaaaagaagagattttgaaatcaccaagagaaagaaataaccatctttcttcttctcctttttaattttaaattatgaacggcttggtatcaggtcagaaattatcattggtgcttttattactgccttaaagcatgttctgaaaataagtaggttttctattttgaatgcagaatcagtagtatggagataccctttccagagtgcacgaactctaatctcagagcaagacttttccgagcacgaatgaaagcagaggggtttatgatggggagcacttcagttgtgagctgtaatgctctttgagtctggagtggtgttaatgttccgagtaagaatcattagtgccccatcatcagcacagacagggaaaacagtgaggctaatgtggggaggacgccaccaacccttcattcttacaatgccccgattgctcccagtgtatctgaagcacaggctggggaagggatttccggttggtctgttgccatccaacttacagtatatttttaacctacacatggctatcctgagaatgctttctagttagatattcagtcctgagtcgtaactattaattttggcatataatatcttccttagttagattcaaagcttaattattatattccatttcagcaagtaaattaaaataggatcaagcaattatgtttggtagccctaagtgactttcaaatgattaaaaaacatacacaaaataagcattattgtggtgattttgtaggcagtgaaactagctaggttgtgggattacaagagataaaaagcagaacaccaatcagcaatttgaaatgaactctcaccatttgaaactgagcttaaaggccactttctggggaaaggcttccgcggtctcccaggctgacaggatggcttttctcttgttcccctctctgccacttttcccgtgcactgccctgggtctcagcgtggtctgcttgcttccctatagggagctccttgaggactgcccacacctttcttgatttgtcttcactgtaatgactagcacatggtcttacattgagccctatgaagtagccatttttcaagtcaagaatggctaagtaccagcagtttcataggattcgatctaatggttgctgaactccatgactgttaaaggaacaggccagtgaattaatgtatcgtaacaagcacgtagccagcgttataaggaaccacaggctgggcgtggtggttctcgcctgtaatcccagcacgtagggaggctgaggtgggcggattgcctgagctcaggagttcgagaccagcctgggcaacacagtgaaaccccatctatactaaaatacaaataattagccgggcatggtggtgggaacctgtagtcccagctactcaggaggctgaggcaggagaattgcttgaacccaggaggtagaggttgcagtgagctgagtcggcaccactacactccagcctgggtgacagagcgagactctgggtgacggagcaagactccatctccaaaaaaaaaaaaaaggaagcacagtgccagcctctcaacacgctgagagctcagcaaactttcagagagctctggtacccagagccagcaaagaggccttgcaaagcttgcaggaggaccacaaatgtgattagagggttaccaagacattcctatggggtggagaaaacttcaaagattttggctgggtgtggtggctcacgcctgtaatcccagcactttggaaggccgaggtgggtggatcacctgaggtcaggagttcaagaccagccggaccaacatggtgaaaccccccatctctagaaaagagaagaaaacagacaaaaaaaaaaaaaaagatcatgagagttttcagtctcaaggaggcaaggcttaggtcttcgtttctgcaaagcaaactggctcaaattgcaagcattaagaagaaaagccttcttgacagggtagaaggattcctaagggcagctgggaagtttccccctctagacatctttaaaaatagtttgggttctcatctgtcattaatgaggctaaatgaccttgcaaggacttttctggtcataggaggtctggcacaaaggctgagggaatacagaacctaagaccaggtgacaagaacagacagtgggcaagcagccattgaaaccacacctcctgcatatgacatggccattgtactgcctgtgtaactcacatgctctggagcacaagtctggcacagcacaaagcggtgccctccgtttctatatgctgctgatgctgcacgtctgagaccatactttgagaactactgctctaaaaatgcggtcgatcagtttgattgaaagttactgtcagaactgttctctgctgctgtgcatgtaaactcgctgtactgcatcctacattaattcagaaagaatctagtttatcaaaacacactgttctccacttgacaagtgatttccaaaaatccttagttagcatttagctacagctcttggtcttgagagcaattaacaagaattatttaattcttcatggtttctcagggactgtgaatggataaaacattcttcacataaaacaaagagttcagttcataatgacagattcaagagttgtacccagaatagatgttggccgggtgtagtggctcatgcctataatctcagcactctgagaggccgagacgggcagatcactgaagatcaggagttcaagattagcctggccaacatggtgaaaccccgtctctactaaaaatttaaaaattagctggacgtggtgacgggcgcctgtaatcccagctactcgggaggctgaggcaggagaattgcttgaacctggaaggcagtgattgtagtgagccaagattgcaccaccacactccagcctgggcgacagagagactcaaaacaaaaacaaaaacaaaaaacctgaaaaaacaacgatagagttaataagatcaggggtcttgctgaagatgaagatgtatagtttttttttttttattaaagttcccctattctccctcaaattaagcacatgctcttgagagatgtgacaggcaaacatgaacatgggcttgtgtactgcccctgggagtgtaatctggaagaagttttctagaaggcaatttgggaatagttatccaaagtttcacagtgtgtataccctttgatccagccattctatatctagtggctcattctaaggaaataatcaaaccaactgcaaaagatttaggtaaagggtgttacccatagtactggctatcatttgaaaagaattggaaatgacagaatgaccaacaaggagaactggttaaataaatttggttcaactatggattggaatattgtaaccaaccaccacaaatgatattggggatgaatatgtataggaataaaaatatttcaaaatatattattgtgtttaaaatacacggtaaaacagtggatatgcaatatttccacttcttactagaaaaatagtacctacaaatgcataaataattggtctggaggattacacaagcataagatgttaacagggaggaatttaccacttctaggtggtaaaatcacagttgtttttatttctccttcctgtttttctattttagaagtgaacagtaatgaacgtgtattgcttttgtaataaaattttaaaaatgtatgattttaattaaaaatgccaattgcaaatgtgtgaaaaaacacactgtttgaatctatcacttataagtgcaacttctgtgttttttgggggtgtgtgtagccatcttgagcttatgaagggacccactgaggagctccttcctctgagaagaaaggggtagttgtcagcaaatgagagtacagggtatgtttggattcctggcttagttccattccttccttgcggcgtggttaggtactcaacctccctgtgtcttagttacttcatctgtaaacgggtatgttaatatagcatctacattttagagttgtgaggattgtacaggataattcagtgcctagcatgtagtgaacatcaacagattttagctattactgcttaaaaacagtattttttttggtagagatgggggtcttattgtgttgaacaagctggtctcaaactcctggccccaagagatcctcttgcctcagtctcctaaagtgctgggattacaggtgtgagccaccttgctcggccagctgttattgttattctgaggatagatgctttcacttagaaagtccctctccaaagcaaagcactggcaaaagagagcagaaacaaaattgaaatctgtgtgcataactgaacactctccaggctacttgctatgatggcagggaaatggtggttgcaacaatgaactttcagtggatcaatatacctgggccaatgagaagagactcaatcaatcaacatgtttagaaagagcttgagacaagtgggaattaaagacagaagcagcccaggaaatctttcagtgatgtgaagtagtaagggtgttatatgggagaaaagctagcaacaagggctataaaaaataacaaagagaactggggtttgaagacaatatggaataagatggttggtgctctttagccttctagagtaggcccgtaagaaaacattcacaatgagaggctgggcgtggtggctcacgcctgtaatcccagcactttgggaggccgaggtgggcagatcacaaggtcaggagttcgagaccagcctggtcaatatggtgaaaccctgtctctactaaaaatacaaaaattagccggacgtggtggcggatgcctgtagtcccagctactcaggaggctgaggcaggagaattgcttgaacccaggaggcagaggttgcagtgagccaagattgggccactgcactccagcctgggagacagtcaaaaaaaaaaaaaaagaaaacattcacaatgggaaaggcacatgtgagcaaggatcagcaataaggagttacctatgtggctgtttctttgtgggcattgcgattcaatagacacacaacacacatttatgggcttagaagctgtattcactatgactcacgcagtatttgggagagagtgaaagaaaataattgatgcttccatgaaattgggcaacagagaatttttttttaaagatgggatctggctatgttgccccggctagaatgcagtggctgttcacaggtgtgatcacagtacactacagtctcaaattcctgggttgaagtgatcctcctgactcagcttcccaagtagctgggagtacaagtgcatgttactgtgcccagctcaacagagacttttaaaaaaatagttgtttaaaagttttttttcccagtctgattcctaagaagtaattcttgaagttatatctgaaaatgacaacttgtcacagaaggaatttgtatgaggacagaggaacaaaacatgattttagtttgagtctcttctaagaggaaagaggcttttacatttagtatttccatctaattttaagatctaactttttcaaagttttccaacccattccctctattgtttcctaaaacacataaaaaagagaaaagtcttaatacttcaactagggcatggattattatttggaaatttgtatatttgaaaattcacgctttagaagtgcttctggattgaaagtttaaaaatcatacaaattaagaggaacagattcaatgagaactatggggaaactatccaaatcctttgggaaataaaagttccaagacctaaatacactagatttgcttatttctgacttaaaaataatcttaaaatatttcctttcttatatcaggaaggcagatttctacctcatcttagttgaaaacagatatttcttttttggggaggattattttttaaaaatatcaattgacacataataactgtacatattcatggggcacaatgtgatgtttcaatatatgtatacattgtgtaatgacaaataggggtaattatcatacctggaaccttaaacagttatgatttctttgttttcagaaattcaaaatcctcttctagctattttcaagtatacagtacagcattgttagctacagtcaccctactgtgcaattgggcaccagaacttatttttcctacctaattgtaagtttgttaccattgagcaacgtctccctattcccctcctcctcatctaccctttcctggctttgataaccactgttctattctctacttgtatgagatcaactttttagattccatgtatgagtgaaatcatgtggtatttgtctttctgtgtctggcctatttcacttaacataatgtcttccaggctcatctatgttgtcacaaataacagaatttcattctttttctttccctgaatagtattttattgtgtacatataccacattttctttacgcattcatctgttgatggacacaattttaaataaacacttagcttggatccacatcttggccattgtgaatagtgctagagtaaacatggaggtgcagatatcaacatactgatttcatttcctttggatatatacccaatagtgggattgctggataatatagtaattctctttctaattttttgagaagccgccatactgtttccatcattgctctactaatttatattcccaccaacaatgtacaagggttctcttttctccacattctcaccaacatttgttatcttttgtctttttgataatagccattctaaatggagtaagatgtggtttttgctttgcatttccctagtgattcactttgggtttgctttgcatttccctactgattaatgatattgagcattttttcatatactttttggccatttgtaagtcttcttttgataaatgtctattctggtcatttgcccattttaaagttgattatttgtcaactcaaaatggattaaagacttaaatataagacctgaaaccactagaagaaaacgctggagaaacacgtcatgacattggactgggaaagaattttttggatatgactccaaaagcacaggcaacaaaagcaaaaatagacacatgggattacatcaaactaaaagccttctgcacagcaaaggaaacaacagcaaaggagacatcttagagaatgggagaaaatatttgcaagctatacatctgacaaggattaatatccagaatttataagggacccaaacattgcaatagcaaaacaacaaataatcctatttttattactttttaagagaaatttccttgagaacaaacacctgtgaatgatactaaccatcaactatgggattagagaacgtaagactgcagagagtattaaattgaatataatggcttacctcttacagtaacagatgcttcctaattgtatatttaattagggaagtgatgcattactgtatattagtgaaaattaagccccagggcaaaattcagggttcgggatggggtatgggtaagcctagggaggcaaaattgaagagcagaacctcatctggccagagcaaatccttcacttcaccaaaaactgtatgtcttggaatctttgaagtgggagttattcataccaacataacaacaacaacaaacccactgaaaagtcaaagcaatatacttatggctttgtaaaatccagtcctgtggacacattatttaaaagtggtaattcttggccaggcgcggtggctcacgcctgtaatcccagcactttgggaggccaaggcgggtggattacttgaggccaggagttcgagaccagcctggccaacatggtgaaaccccgtctctactaaaaatacaaaagttagccaggcatggtggcaggcgcctgtaaccccagctactggggaggctgaggcaggagaatcacttgaacccaggaggtggaggttgcagtgagccaagattgcaccattgcactccagcctgggtgacaagagcgaaactctgtctcaaaaaaaaaaaaaaaaaaaaaaaaaaaaaaagacttcctctcaagcttggcaagcttggcgtttggtcgatggggacccatgggggttcaacatgtgtatcaagaagtgttatttctgtctggggcccatccaccctggccatggcaagatgttcatccgcaatgattgcaaggtgttcagattttgtaaatctaaatgtcattaaaaactttaaaaagaagtgcgatcctcacaaagttaggtggaccaaagcattctggaaagcagctggtaaagagcttacagtggataattcatttgaatttgaaaaccgtagaaatgaacctatcaaataccagtgagagctatggaataaaactactgatgcaatgaagagaattgaagagatcaaacagaaacacgaagcttaatgaacagattgaagaaaaataaagagctacagaaagttcaggatatcaaagaagtcaagcaaaacatccatcttatccgagcccctcttgcaggcaaagggaagcagttggaagagaaaatggcacagcagctacaagaggatgtggacatggaagatgcttcttaaaaatctctgtaaccatttcttttatgaacatttgaaaatgccctttggagacttgaaactgctaaattattagcttattttttacataaggccacttaaatgaaaaatgattaaaatatatttttcctaccttgccatctaatggcactaggcagcatttgtataataactaatggcaaaaattcatggctagtgatgtataaaataaaatattctttgcagtaaaatattccctttattaatgttatagaagggaggatacaacaaggaactaacaatttgtatgacagtgtcaaatattatttagattttagaatttcctgttttgcttcatttgcatcttagaagagcataatgacattgtttgatgaagcctaattatgctggactgttttgagctggtttaacccttctgataggtagttgtggatgtcgaggatgagaactgaataatctttgcctgaaatcacactacactctagaatttccactctggagaatactcagttctaacttgtgattcctggtagaacaaactttatttttctagcctagcaatgatctagaagcagaggaatcccagtgccttttaaaagttattatgtggttttcttttaaaaagctcctgtttttggaaagtagaatttctgggtacaacatctgtttattatttgcacataaaataagccatttaaaaagtgaaaaaaacaaaacaaaacaaaacaaaaaacaaaacccagggcaatgaatgttcctggcacattggagaggcagtccagtctctggattcacagtgtgggtagtggagtggactgcctggtttcaaatcctggctctgccacctgctgtctgtgtgaccttgggcaagtgacttaacttctcttggactttgttttcccatatgtaaagtgggagcaatggcaatacctactgtgtggactgagtgaactaatgcacataattcagttgtgcagggcagggtgtacagctctcaactgctacctgttattagccctaataaactgattttaggagggcatgagtatatgtcatttttaagatcgtctattatgatcccttaggctgatggcaacttgaaagtgcctctatggtaatacttctaccactttggggtaattaaatgttcacatgttggtttcctccactggattgtgaactcggtggattttagtcatctttgttaacaaagtacatttaaggaaacattgatcagaattgggaaccacagtgatttacttattactgggagagacattttcattttggctaaaatgcatactttgaacagaaaacatctttttttcaattaaaagaataaacaggtaactcttaatctacaatactttggcctaataatattaccatgaatcaactttttagaccgtctgtgtcctaaagtatttttcatggggagttttgattgaactgggacttttggctgaaatgccaccatgctgagaacagagaaaacagcaacttggggttcaaactgaaaattagctgcaagttgagatctacatcatttatagttggtgaaagttctaattcacaatagaatagttccagatagcagatcaaccctatgcttctggttttgaaagactctggtgaaatgtagtgaatgcaaccttagctactttatcaagaactgagacttacttaatcaagattggaaataagggtttatgatagtccgagaagtaatgaagtttctattttcatgtaaactacataagcaccaagagcagcaaaccagaaaaatgccccccaaaacagaagaatggcttctaaatatatgtttttttctaagtttcattttaagcaacagacaaggatttaactaaattattctctacttaggctactaaaatggcttttctattgctatcaggatgtaatttcagatccactcaatttcatgaaattgactgagattcaaatcatacatctggtatattttaaatgatgctgcatgcactaggcaatactgatgctgattatcacaccggagtagctggtctcaggtaatttagttaagagtattaaatcagagatgcccaattaatttattagacatgttcatgaatatttctaaaattattatgaggcttgatgaatgaaaactttccctttttcttattgttcattggtgacacaaattaggccagataaatatttagaatacaagatttccagaattataaaaccagggagaactctaaagtgtatctagtctaatgttctcattttatatgtaagaaaacagaggatcggggaaacaggagaatgtagtggttaaaagcctgggctctggagtcagacagacccgaattccagtctcagattggcaagttattccctgtgtgaccttgagcaagttattcaacctctgtaagcctccatttcttcgtctgtaaaatggggacaataattgtactaggggacactgtaaagactcagtaaatgttagcagctatcatattatttttatgaataacaggtgactcctaaggcaaataaccagccacggaactaaaacttagagtttctgatatatacagaagcttgtttttttatctaaactcagtacctaagttaaatattcactggtactgacaatttaagtactgtctaactctgcattaaatagaaggataactatttcagtcttttttgctgttgaattgatcaaaatattagtgattacatattgaagtctcaatttcatgaagattcacacatatttagctttccataaacaatggatatttcatgtttaccttcatagctgtttcagtgtaattatatgctcttaaattattttccaccaaaagctgctcatataaaataaacaacaaggtatattggccataaataaaagttaggattgcacttactaatgaccttaaatttgactttagttagatgctatattgaacaagtctgatattctcaatttgtgcagttactcagataccagcatagcctctatacacctgttatggaggaagcaagaacaagggacacgtacaaaaggaaaaggtgggtctgcaatacgagttagagttgctttggctaaaatagactcctaggaatcaagcagccactaatcacagatatttggaattgccattttttttttttttttgagacagagttccacttgtgtcacccaggctggagtacaatggtgagatctcagctcactgcaagctctgccttcaggttcaagcgattctcctgcctcagcctcccaagtagctgggattacaggtgcatgccaccatgcctggctaatttttgtatttttagtaagaggggttttgccatgttggccaggctggtcttgaactccttgacctcaggtgatccacccaccttgacctcccaaagtgctgggattacagacgtgagccactgtgcccggcctggaattgccatttttagttaacatttgcccttaaatagttcattccactcaaagttgaatttaaaaaaataaaaaaaaaaaactgagtaagaaattgcataaagaatattagctttatataatatgctcttaatacttctgcttttgataattttagtcaattggtgatgttttcagtaaatattctcagactattcagtgcgtgcttaaaaccttttgttgtaataaagatcatttttctaatctcgaaaatgatacaattaattttaaatctttaaaaataattaagaacaaatatagtacaaatatagcaaatagacattaactcaaactatagtgagataagttcaagcataaacatgcagaaagcaagagcacctttttatgtaataccaatgtgattcagcagaccaacagatggagaaaatagtaatttgaaaggtggcaatttgtatccatacccagtatttagtatttcagctactagaaataaagtagtttggcagacttacccgcatttttgcacaagcatcttgggttgattctgtccccctaagctcttttatcagcatagaacctaaatactaaaatacaaaaaaaattcaatgatttatgaaatggaatatacatatgagtaatgttttaaaaacaaattgtggaagtattactggctaggtttcctggctgtaagttgttgcataactttaaaaaactgacagtaactaatcctaacaaataaatgcattcatagagaaaatgcagcagaattaaccataagttctgggggctgtaattgctctttataatgaaactgcaacatcttctaaagatgccatctttcaaatcatatttaactgcaaaatgggggcatctaaaaatgttttccccttttttgaggcagcaatgtctgcaaaaataaatcacactactatctctgtaattacagggttgcatgagacagctgagaagctaagcaacatgtcccccatttaggcttattctgctgcataggtaattaatgttaggcttttaggcagagatgcagttttggacctttttcattcacagctgtgtgccctatggttgatccacctgagaacgggatgggagggtggggggagggagagaggcattctcagttgtttcccaggggaagagagctgggttcctggtgcgaagtgccacctggagggctgaatggagctagaaggatgacagtctcccaagaattgccaactactttgttgttagaagaccagaccccatactgtatcatcctggtacaaaatgcccctcgtgctccagcttctggctggggccaaatggttttaaacaaaatgtctgatttgcctttctatcaattgactccccttcaaccttttgaagctttagtagggtttttgccttttgtcattcccctgccccttgccctccccccaccagcccccaaagagctctatatatgttttttaaaaaagtgaattacaataattattttagaagatatctgatggacacttcctgacaagactggagacttgtactctgcagagacggggatgggaaccactcttgtggactagggaagtgcctgacttgaagaagacgtgagagggcacaacagcagaaggcgtggtcagggccttggagaaaggcatgttcagaaaggcttggggacttggggtttggagggaggagccatttcaatcctatggttttgggcagtaccactgaaataaatccaaagctgcaatataagtaagctttagtaaaagaggggcagaaagcagaaaatgaaaaaaaaaaaaaaaaaaagctcaactggtatgagataaccacaatgtccatctaaatcaaatgaaggtgaaatttattatcttttggtaaaatccttatcttttaagttatcagggaagtttgcctgattgaaatgtttctttttaagagaggcagtttcaatgcactgctgaaggttcagccactttttctgctgtcgtcaagacaaccaccacctgacccaaaacctacagtatcttttgaacatttaccagttcctattacatttctcagctaattataattaattcccctcttctaaaaaactaaacaactaacctaaactaaaccaaactaaactaaacaactaaaacagaaaaatagtataatcctattgatgacagtgaaaagaatctggtatttacataaagtggcagacccagtgttttgagacccagtgtttggtgagtgagcagagatatatatatatatatgccatatttacactcatttccattttaagattgtacgttataacatttatttaaaaatatacaactatataagaggtcacaacagaccttaaacttacaagattaaaacggttttaaagctctagttatttggactttctctttggatagaaggctactttaagaaaaagtgaagagaaaaacattttaaaaatttcagtgatggatatggatattttggtatattttcaatgtaaatgcaaacaagctgaaaacataccccctatctccacttaggcccaaatactgaattgagggtaacttacaaaagctttgtaatcacacgactggaagataagcttttctgggtgatgctgccagtactgtaccggggtagaggctgtggcttcattcggaggtcgcaaggtaatggaaggttctccccagtctcctgtctgaaaatgacatttattctagaggcaatatgagcagtcagcaaagttcattccctgtagctaccctgagctcaccttacacacaggtgctgtgaatgtaccaaaatgcatttgggtgtcttatgtgaatataaatacttggttattacatttttatatgtattagcatatctctcaaggctgagttaatttttgaggtgtggagttgaattattctatttttagaatgacatcctaagctaagtcactttaaaataaaacatgaagatattcataaatgatttactaatcacaattttccatcacaacagcaaaggacacacaatctttaaaagaattttgtttttaaacttgactgaaatttttagtttgaattgctttcacattcagaacacacagttctataaatttcagttcccaaatatgacatgtactagccactttgaataattttagatctctggagaaatggtagtgtaagcatgatgctaaacaaaatttaaaagaaaaatttactaatgggtgacactaatttctctcatctgaattcaattgcactgatttaatgatgctgtctcagatggattcagctacttttctcagaaaacctaacgtaccaatgaagactaaacagtgaaatgccaagtttggtcacatgtacataggcatgtactttgaggattctgattcacaaatacaagcacattcccaaatgatggtatatcatatgatacagacctaaaacaggaggacctcccatcatttcatttatcattttccatgaggttagcctcaacctgtttcatcagtataatagcttaatgtgagcatctataaagtcaaaggccagtgttggcaggtattttctgggctctactctgatttacatactacgcatgagatatttcttactctttctcctgggaaagatttggatttttccaaaactcagttctttgttctcaagtggacataactaaaactaaataggcagatttctagagtgactctcctctaacctagatttggctatatatagaactatgagaaattacttttctcaggagttggaagagtgtaaaaaggtctcataaactccaaaatcaaataaaaccttggttagagaacaagttccacagaagtgctagaaagtgtgttgacacactgtgggatttcttaaggagaatttttaaggagtctaggacaagaatgcaaaattttggatgcagttgtatgttttgggagagaaaggaagttctctgctttattaaattctttgaaagaatctagaaactccaaaagattaagaaccacagttctctaggaatggcgtacatagggtgcatattttggggaggagaactagctctccaattttctttgcgcactttggacttacattaggtgacatatgaagtagctgccaatgataaaaagccctttctagaggacttcagtaatgcacaggctttttttttttttttttttttttttttttttttttttagcagtggagtgcctgaagcttttctccttgagatgggtcacttcgactcgcagaagagcaaagttagcatcacgctatttccttggcttctcactgtagttagtgtgtgactagttggaactccttcggcttttctctcctgctctgttctcagccactctccacattagttttgttttcgttgctgatttacttttacattgcttaatcctcctattccctgtctgttggtattttttatttttgtacacatttatggggtatatgtgaaattttgttacatgtatattgtctgttggtattgttaagactttacttgcaatattaactttagcatttttgtctgttttattatccatccctgactcattcttgagtttttcttttatatttatatgaatttttagtttgtaaaagtgataactgactgcaattctaaaattagattaagtttttctttggcttcttattttgattttttttcttttccttctttctcaaatggctggctctttattctctctctggtctttatttcatctggctgtaacttacttttgaaaaactagtataaaattcaaaatataggatacgtggatttcaatatcattttgaagctgagtgtaataacctttaagtgataatagcttaaaattctggaaacatgcagctatgggttcttaaacaaaagctttacccaaatctatcaaatcatcctctaatctcccccattaaacttctccctccttctcccgctccctggataaagcaacaacaacacggcaaacaggtattgtacatttaagtcacaggtaacactgttaacaaaacaacagaagtttgcatgcaactccgtggaatgatacaaaaggaggatctggatggcttccaaagatcctttgatccagtgtctgctgatgtgacaactcaaaccaagcatcagatcttcatgtgaaccctattacagttcagcagaggtagaccttggccaagctcaacaggtagttttcaaaaaagtctgaacacggcatgagctggtggtgccatgagttgcagggccagggctgggaacagggctgggggtgggaatgagttgggggaagctagggttatgaaaacatttcacgtgttagtacattaagcatgcaaatcatatgcaaattcattctctaattgttccattaactcacacacttttataattaaactttaatgtgagttccatacatttaaagccagagccacagccaaatgctgatccaaatatttacgtcatccacataagttgtagcagccattgtgggaataacaagccccagcacatacattccaatctcggtctggaaatcactgaaatcccttatttgataaccactggaagaaattagtggaacatccacttaaatctgtttagacagcgccatcatctgctctcccatgactccactttgtccaaaatcacaaaccacttgctttgaattcagagtgatctgataggattttccctaggtgctaaggtgggagataattacaaggaaaagaaatataatacttatttcattttctttgtggccttcaaatattgcttcagtccaaatattgtcaaattccctacagggactgaatctacctttctggaaagagacactgaattttatcagatttagtgctatttccagaaattcatttttaaacagagggaaaggtgttcttaagattgaatttattagaaaataaatttcttttctgcctggaaattcatcaacttctctccccacccctgcctattttttttttttttaaacttagatctaaaagtatttagaagactcaatttgtagatgttaattcttctttttggaattaatttaatgggaatggatggactccaacaactggacttaacattacactgtcgtaaaggacaggtatgaccttggcccttggctgggattcagctgtacctggttgactcccagtaagaacaaaagagttcagagaacaagggtgccttaggtctcaaccctcctggaggctgaattacagcaggaatgagctatggaggaattacgtagagtagttactatatggaatggaagaagaggtcaaaaaagaaagatttttgcctcatacataaaatcattttgaactttgaagcctagtgttaggtcttgttgactagtacattcatgtctacataatacttgcatctcctcaggcaaatatttttaaatttagtaattttccacttaaaaatccttattaaatattaaataacagacctaagaagtcttttgccacaataatggtttataatcaaagcttatttttaatgaaaagcagacctaaacacagctaacaacgcaatatttcattagaatagcaaaatgaagtaggaaaagtttagggtagaattctgtcatattttaaattattattgacacagtggtctttgaaaggattccttaagtaatcacaaatgagaaatcaaaatgattcaaggtactcctaataaatgtcttcaggctatctctttggcacttaaaatatttacagaaaatctttcctttaggttcatgtatttgaaagatcttcatattccaagaattttgtcatggcttaaaacttcatttatttggtatttattattattttttatatgtatgcttaaggcctttttttttattaagcacactaaagaacatcaattaaacagaggaaaatgtacatcattagctctcttcttcaaactcaaataaaaactaaacttctaacataaaggaaaaatactttgacattagaattttaaatggagaattgattctgtgtaacacatgtttgcaactgccaactataaatctgtagtctgggtgagtctgaaggactataattgggccacatctaatataatgtaattaaattaaacattctcttataccaacaactgaaaaatacaaaagcatcaatgggatttagttaaaaaacaaaaagcttcacaaaatacagagatttttactggatggcagattccaaattgcagcttttaaactttgcattatttcaacaggtggtaaatagctgcaaatttttagttcacatgcactggacacctacagcaaattctaaaacaaattgtatcaggtagctgtctccctccaaaagggaaactgaatattacatattctatatgctctgagaatagaaaggaaaaacccttctctatgttattttccgtctttattattatttatttttccaagatggagtctccctctgtcacccaggctggagtgcgatggcacaatctcggttcattgcaacctccgcttcctagggtccagtgatcctcctgcctcagtctcccaagtggctgggactacaggcatgtgccaccacatctggctaacttttgtatatttagtagaaacagggtttcaccatgttggccaggctggtctcgaactcctggcctcaagtgatccacccgccttggcctcccaaagtgctgggaattacaggcatgagacactctaccaggcctttatgttattttcttcttaaggaaaaagtttcctaaggatgtcagtagataattaaaagccatgcttacaacttacttttctaacattaatagaaaagtatggcattttccaagccttgtattattctttaaaatttttaaaaattaggatttaattgatttttaaaaatagaacctttaaaatcttttctatgaggactgctcccacctacttgcttataaatttagatctgaatattaacaaacattagtctcaatttcttcagaacacttaatgaaaaactaaaatgattttaaaggacaattattgttttaaggttttactttcaataattatgacaaatttcagagatgggctacccaaacatacataagatatatgtgattacatttactttctgtaatctctaaggctttgaagaatgctatacacagctctatgcttataaatatgcatacgtatatttgaaagtgaatgtaaggaaaaggcttcccataaacattcacacataatgaaagcaggatgttgtagttgttctttcaaaaaatcttcaagaatgaagaattctagtttgatcaaatgcagttggttatactgaatttgttcctttagatgaaaaagagcagagatggctacttacgaacacataaaagctctggttaacatttatgagtccaagaggaactgctgggtcacgtgaacaccagtaccaggcaatgtatagacaccatggtcctcaagagccagaagtcccatgcacaggagtacatatgtgcctgatgcagcatcccaaaaggcacttcacaaaaatacccgtggcatcccttcacatgccgccccaagaatctgctcagtgattctcaaccaagtgtctcaacctctcagacagcaggctatccaatgggagaaattcaaaagggtgtgaaaatagaatagtattttaaaatatggaacataaaaccccaaacatttaaatgtttattttccaaatagaaataaactttttctaaagtatgcaaaggtgaaatatgaacatttgaaaatcatgcagctcagagtaaaatgggtcacaatttcatacaatttgcaaagatcaattcagtactgtcaaatggaaaaaggctgagaaccactttgtagctgtaaccgtgcctctcccagctcacctccccccacatttgcataaaatgtatacagaataacatgcaaatcatactcagaaatttctcacaagtgaagcacatgaatctttgagaatcattagacacaaagggttgaagagtccatgaatatggggaggtacaaaatggggaggaataatgctgatatatacatgtgtgtatatatatatatatcaatttacccttttctttttcctgtaaaagcaagtttaacacagacgcctggaatgaaagccaaaactcacatgggacatattttaaccatacactttaaaaccaagtatgtttcttgttttaggacaatgtttgcacatcaactaatcacaaggcacagtaaatgaagtataatagacaaagagtctcggagtcaccagacattacaaattttctgcattgccaggacacagtacctatagctgttgacaacactgtgcaacacagtacatagcgcaagttcaggagaagaaaagaaccatttgtaaccttacattatgaacctgatggatcgctgagaaaggaaatcctgcgttctgattcgtccatatttcacagacagacgactgctgatataaacagaaaactatcttatcttgtcaatatttaaaacatggcagctaccaaggtagcatccaggaaggaaaagaggaaaataataaaatgcaaagaatcacatttaaaaaaaactcaaaaaatgttttagggtgctcaaggtttaataattgacttccaagtcattctttttgctttaaaacattttgagttgactaaaaaaatcatttatgcatttatgcaaggaaaattaccaataaattcatgccttggaaaaaagcaaactgtattttatatttgccggaaaaccagaaataccttcccccttcacgtcactactttcagaggataaatattttcatcaacttcaggaaaaacaggaaaaaacctttaacacaggtccgatatttttattttcttatcttcaatgaccaagagcaaacagtgcaataaaatgacttttcctgatttagtcattgctctatttgacaaacctagaagatatttatgcctccagagttcttacgggcaaaactcggtagttaacaaaggaagacgtgtcagcttgctacccagcactgggaggagtgaaggaggtggcaggaaggaggctggggcagggaagaactgaagtcagggaaattcagttctgttcctcaagcagaaacccttgggaacagcatttgggagtctaatgattcagctccataattctggctctcccccacaccattaataagataaacttatcagtaatgtttgctcagaaccaaacactaaactaaccagcatcccttcccaggagttacagtagaaaccttcaaagagaccgactgagctcttggcttgacccatcccaagttctgttcccgaatttcatcattctaaaagacactgtgaaattaaatcacagaaaatggcagagcatgtaaacttattcagcaagctctgtgagcatctttagcattcacaagcagtccgtacaaagatcactgcaggaagaaggcaagcacataaccataatatggttaagaggcccggcaaagaactgtatcatcagcaaacaaatgatagaaaagaaggcttatccctagctaaaagtttcctcaccccagaaacgctcaccagcaatttaacacctctctctctagttacaactgcatctccacacacccctacacctttgctttccatgtcttctgttaaccagaggcttgctggggatggttaaggaagttagatccccagggtctgaccaaaggcacttccaaacacctttcacttaaaccagctctgctatcctcagttccctctctaaacttcatgctattttatacatccatagagggttcttcctcttcttacctttctagcaagttcagtcttagacccattcactctgttggccttgtctccaatagctctcctctgatttgaatgtactaactccatgcgttagctggattaccatcttaagtggcatcctcacccagtcctgagctaattctttacacaaatcacatcttctgcaactttcacacacttctagtgttaatctagtgctagaagtgcttctagcacttctagtgctaaataatccagagaccacctgtcatctgatagatgaagacacagacatttaaagaggtgaagtggcttgctcaggtcacacaggtgagtggcacaatgtgtcagcctgctgggatggctaagaaggagtgtgagcctggtactgatgtcaccagaaggcagagggccactccagctatatacagcttggttctactgaccctgaaatgaacagaaactaaaaataaaatcgtaagccccctcaccgactgaacggacccccttgtggccaaggggaccccagaaaaaccttaaaattgagtttctgaccatgatgggatgggaggtgagacaagcctcattatacctcctctttttcatggtttagacacaacaactgatcggaattaatgttaaaatagacatcataagagtgacagaacagtctctttgtggctataagataccaaattatcaacaggacccgaggccatgctaggcaaaggttaagtcacgcacccctatacctaaagaataaactatgttccaactgccacaaggtttttctttttctctagcagctaaacaggtactggccttaagagaagcaatatttaaacaatttgcacctccaccagatgctgattgacccttagcccctgctccaccagccataactacagctggacaagagattgattcagtaactttatccaaataagattactaaccatggactagttctggttggtctacagagattgcacacttgtgtgccttcatgtcctgaaaagcccttctgacgaacagggctaactgtaatatatctacatgttaagtctccaacccaaagtgaacataggccacatgttacatgcatgttggttcaatacacatgtgtcaggaccaccttcatgaatattcacagctcttgtaacacattgaatatatgtgtttagctaatctgttcagcataaatcttctacctaagcccttttccttcgaagtacccgtctctggggtcttggttggaggtgcttcccagcctgcgggatggccatcttgcaggctgtaaccctttagaagaaataaagtctcctctactttactaaattcatatatatatatttaagttaacacaagtatatctaaatgcaatcagttcatgagacagtcttaactgcactggggtccaaacaccaaaaagttgttttaggttgttttggttactcccaaaggggccatgcccagtctgcctgcctgatgggcacaaggccatttaaccttttgggcagactgcatcacttcctggtcactttgagtcatgaagactccattttgtatgaaatccaaactcatatctgattcaaacttttccttccctccttgtgtgtcagtcttggggcttaaaaagcccggggtggataagagaagctcggtctgcgctttgacttctcctaggagaggtgagggcaggtgtcatggtctaccttggatgttccctgccccaagctctacctacttcatgtgtttagttggggaggaagaaacaggaaaaggacgaggtccctttcttgtctggctgttcctctggcagccgcactgcttttcagctaacgttaacatggtctcccatgtgctctacgtagcagctgctccaacctaggttctcctgtgtccccgtgtgatttctttggagagctcttctaggatagagggcaggtcctcccactgcacagtttctgctggcagaaatctgcctctagcttgacttcttccaactcccactcagccctcctaggacacatgcatgccccctgaaggggacccagggggacaaacataaccccagactccttctgcacatccatgtggcccacatgatatggacacacatccttgtcacacagaacagtagaagggcgggctgctctgtgaacactccccctctctgccagggcatccctccccaagactctctgtgtcagctcggtaggtgctatgtgacctgcctggcagaagtccaattatggataccaaggccagttttccctcctgcaggcacccccaagccagatgtacattcctcctggaccccttctcaccaggattggagagcacgggaatgcattctgtctcctctctcatggcaaaggaggaaaagccttagttctttccacaggactcagacaattccctgtccttctccagcactaaccaatgttctgcctatgtggagaggtagctgacaggggcagggcaggattcacactgcctccttgtaaaccccgaactaggtgtctggctccatgattgatagctttctctttagggtgtgcagtgcttagtacctacaggaaaattcccacttagcatcctgggaatagatcttccaatagtgaatagatctttcactactcacagaaatttaccagagttaagaagggaaaagaggatcctacgccatacttatttcattaaaaaaaatcatataaaatttttctcaatgaagaataaagaacctacccctagtcatatacactgagagttcatacatggcttatgtacattttttagatgttataacaaatattttctatttataagctatgttgtaaatttagagaaagtaaaacctctataatttctaataccgtcatgcacaacataacgatgtttcagtcaacgacagactgcatatgctacaggggtctcacaagactacaataccatatatttactgtaccttttgtgggggttggaagaagtaaagctagagccagacttaggtatgtttagatacacaaatactcaccattgtgttacagtcacctacagtattcagtatagtaacatgctgtacaggttgggaggagcaataggctagatcatatacagcccagctgtgtggcaggtgacaccatctcacgttgggtaaatacacactatgacgtttgcatgacgaaatcacctaacgatgcatttctcagaacgtatccccatcattaggttatgcgtaactgtcatcgtgtcagtgcaagtggtaaaaagtcagaatttaaaagagtttaaaagcagttgtgtttgagttgtgaaaattattattttattttttttgacacagaacctttgctctgttgcccaggctagagtgcaggggtgcgatctcggctcgctgcaacctccgcttcctgggttccagtgattcttgtacctcagccactcgagaagctgggactacaggcatgtgccaccatatccagctaatttttatatttttagtagatatggggtttcaccatgttgcccaggctggtggtctcaaacgcctggcctcaagtgatccacccaccttagcctcccaaaatgctgggatgaaaattatttttttaaaaaatcggatgcattccagataccgcagtagttttgttagcagtaaataatttgtcaggctcacagagcaagcgacttaaggcagacctgttgtaactgctgcattcataatatgaaatggctcttctcctagacatagggtcattatactgagtgctggaattaattttttaaatccaagagtttccagagtagaaattaattatgtttatgaaaataacatttcagggtaaaacatgtattgaagtactgagttttgaaaagttttgagaaagaaatataataccagtcataaaatttcatctggggcccaaattcctagaaaagtagtgagttaagtttttttgtttttttttttttcttgagatggagtctcattctgtcacccaggctggagtgcagtggtgcaaccatggctcactgcagactggcccttccaggcttaagtgattctctcacctcagcctcccaaggagctgggactacagggatgcaccacttcacctattttttttttttttttctaaatgtgtagagaggaggtcttgctatgttgcccaggctggtcttgaactcctgggctcaagcgatctgccttcttcggcctccggaagtgctaggattacagttgtgagccactgtgcccagtcttaaatttaagttttgtttttttttttcttttttggtggcattggagacagggtcttgctctgtcacccaggctggagtacagtggcacaatcttggcttactgcaaccactgcctcctgggttcaagtgattctctcccgggttcaagtgcctcaacctcctgtgtagctgggatcacaggtgtgaaccacctcacccagttaatttttgttatttttagtagagatgagtttcaccatgttggccaggctggtctcaaactcctggcctcaagtgatccaaccaccttggcctcccaaagtgctgggattacaggcatgagccaccgcacctggccaaattaaactattttgtttttttagtttttgtttgtttgtttttgagacagagtcttgctctgtcacccaggctggagtgcagtagcgtggtcttggctcactgcaacctctgcctcccgggttcaagtgattctcctgcctcaacctcttgagtagctggcattacagatgcctgccaccacatctggctgatttttgtatttttagtagagacaggtttcaccatgttggacaggctggtcttgaactcctgacctcaggtgatctgcctgcctcggcctcccaaagtgcttggattacaggcatgagccaccgcgcctggccataattaagctttacaatgtcttcatctgtaaagaaggagaatagtacttgacctacttatttcaccaagttgttgtgcagcttcacgagagaggaaactttttcacagctaaatgtttagggcttggaacacagaaggaacacatttttaccgaatgaatggaatcatataacacattcaaaaggccttggtaaatggcaaagcattatgcaaacattagtcactaccgttatccgttatcatttttaactggtctactctattggtgccacttgtgcctttcataagctatgtcactgccaacacacttccggttaattgtaccagaaactgctgacttcctattggaagattcctcatatttcctgataaagacagtaaagggctgccagcttgccgaagagagaaggaacatttgtcattagcatacctaggtgtcaaaaggctgcttgtagagcttagaaacagttccatgaaagaatgttaatcacccctttgcaatttcatttgcctattttctctcaatccctgtcacatatattgcaaagcctcatttagtttttctgaacctgaattactatgaaacccaaacaaataggggtaagtaaaggtagacttacaactgagatattaccaataatttaatgtttacttctttgatggtgaagtcaacacacatttgaaggtgtataattttatcttcagttcagacctctctcttagctctggaaatgttttcttaaaatgcaatgcatgtctcgctcttgttaccgtcttatactttcggttaccatgacttcagctcagaaaatacaacacaactgcattcaaatctaatcacaaaataaaaagaatataaccaatttccaaagttttcctcctaaaggtggacttcctttttgatccagtagtttacaataaattatctccccttcattatggtttgtcctctttcctggagcattctcagaaattgctataacatcttccatcaaaagcaaacaaactccttcccttgccccaacatcaccctcggtttcctgctcaattactctaatcttctttaagcaaaactccctgagaaatgtctagatggtctccactttctcttttcctgtcctcatctgagcccactctactgaaactgaaacaattttctattttccttgacctatgtgacacccttgatcactcctccattccttagcctctttggctgcttcctgttatctgagcatccctggagtgttagtcctcagtcttcccttccttcttggctatactaggtggtctcttccagttgtgactcccaaattcatatttccagcccagacttcttccctaaattcaagacttggacacccagctgcctgcttgatgcttctccttttgcatttattaaatcagctcaaccttaaattaaatgtcagagaccaagctcctgatgacctcacctccctgtgagcttccttgttttggcaaatggcagccattttttttccagttcctcaggttcacaatgctggagctctcctttctcctgtatctcgcattcaatccagcagcaaagcctattgaatctacttctaaaatttcaccttcctgtcactacttgctccaagctactcccttttctcgtttgatttattccattggcttcttacgggtctcactgctgttatccttgcctccttagtatctcttctcagtactacagccaaaatgacccatctaaaatgaaagccaggtcattccactcagctccattcaacacagaagataattcagtcctaacaatgacctgcaaggttctccgttctctggtacccacactgctctacctccctaccctcctctcctacccatcttcgtcttgctgtctgggttcttgacagcaaagcacattcttgcctcatagcctctgcatttgcttctctttctgcctgacatgttctccctctggctactataggcctagctagctccctcacttccttcaagttctattctaatgtcactttttcagagaagccttccctaggcatattacatccaaattaagtctgtgctttccactctataaaagaattattctttcaagcagaaattatttatttatttatttgtttgtttttgagacagggtctcactgtcacccaggagggagtgcaatggcacgatcttggctcactgcaacctccacctcctaggttcaaatgattcttgtgcctcagcctcccgagtagctgggattacaggtgtgcaccactacacctggctaatttttgtatttttagtagagacggggtttcgccatgttggccaggtctcggactcctggccttataggatcccctcgcctcggcctcccaaagtactgggattacaggtgtgagccactgcacctggccttaagcagaaatttaaaatgtaaaaaatgtttggcacataagaacctatctccctgtcaccctgacattcatgcaaaagtagttactggtcatctactgtgtgcaaggcctgggtcacaaagtgagtagggatcaatcttgcttttaatcaacgtttatggcatgaaaattgctttctccgtggacagaaccagtagtaaactgggactgacaggctgatggtgggtctcagaacagagcaagtagatgacagctccatcaactcgataacccctattaagctctggaaagcttctgggagtctgctgatattatatagctaatctaataaagaaacttttatgaatagagccctccagtcagattctaccagagatgaaattttctgccgtgttctagccctgaaaaaaaaaaagaaaaaaagactttttctctgtttctcccttatgtttgtcataatactttcaacacttcagggtattcagaaattgaccagaaagaaaccagcaagaaatatgaaagtttcagagtgaaagctcaaggaataatgaagtgcattccttcttctggatgatagtgcttctaaaagaaaatgaaaacagacttgaagagcaaacaaaacagcttcaaaggcagaagaaaaaagggcatcccagcaaaggaagccttagccaatagccagcaaactcagtggctccttgagcagagactgggatgaaatgagacctgtcaaaggatggagtcaaacaaattcagtgcagtcaaggggtaacgcaccaaacaccttgtatgcatattttctttcagcagtgacagccccacagttgcttcttctgtgggcattaactgaaccctgcctggaaaatcagaaaattagagccttttgtttcttgtgagttacccagaggccgcaggccagcatctgattacttcttcctgcccaccatcggagacagaggaacactcctccttctcacctcttgagtgagttttgagatacacactcagtcctgtaacaactgcatgggatttagattcttctctgcaaccacactgttagcttctcaagttccctgtctgtgtctatttatttctagttctaaagtgtgaaaaagttatgcatgcacccactgaccctttttataaaaggtctcagctgaactatttcatttgcaggaaatgctagagtcaagaaaatgctgcttcctgccatttctccatctttctgaagggcaatccttccaaaacttcatgatcgtgaccttcccctgtgcctgtggggaggatttttggacagatcagttatcacctgctgggaaggaaaagccaggccaacagttgtttctctaacaacatctgcacgtgtgacccatgattgctggagtcagcattaatcaacctaccaagagtgggaggaagtaaacaacacatttggttccatctaagtccactggcatgatataaattctaacactgtcttcccaagtttaaggttttccttccattccctttccaaactcccttccctttcccattcctctccagttccctccctccctccctccttccctccctccctcccttccttcctctcttcctctcttcctccctccctctttccctctttcccttccttccttaactctaattctgggactgatatcacataaaagaagtcctcggctactaaagtaggagagaaggagagaactataggcttatgatattcctgttattcatttgtagaggtaatatataacctgtattccctaatatgacagctgtagccctaaatggcattacacaattgtttatgaaatccctttacaagaaaaaaatagagcagaggaaaaaaatgagcattgcctgtacaatccagctctcattgtgcagctccccaggttccagggatgttgcagggaatttgagtcaattgggatcatgctgtttatagcaatatgggctgttttacttgttctacctcaaagtctggatgctatcaaacgtttttcagggccactaaaaagcagaacattaataactaattcagaaaggcagtgatcagctttttatcataacatgaatggctgaaaaaaacctagattttgcaaagtaatgttgttctttgtaacatctctttacaatatacattatattcctttcttgcaaagtgaggttgtcatttcctttacttaaattcatttattaactggagcccgactgtttgtttcctgcttctgacagaaaagatgcattgggcagagtcatttattcaatgatgtttattgagaccccaccatttcttcattttatccttgtgaaaaatatgaaaaaacaaggtgcagttgaacaatcctcttgaacgatgccaagctaagaggtctctagtagaaagctcacagtttttttttcaattctactttaatcaacacttcactcaatacactgatggatgacttcaaaggtttgttgttttgaggtaagattcttaaaatgagcacattacatagttgaaaaggatcactgatatactgagtggcaactaagtcttagaaaggtcttgatagactaggattattggatgagtaactttataaaaactgctttatctggaaaaggataatgtaaatccagcgctgctgagaaaggaggcgtagctattgataaaggctgggaaattttcatgaagaaaagcacagtaagaatgaatgacatgttaatgttgatctgcccagagctggggaaccaggatgctgtacggcccacatcccccttatcacatgggattggcaaggagctggagacatttaatatagtgaagggaaaatatcaaattgtcttcagtcttaaaaaaactcttcccagcaaaagggagcagatgtattctttgttgtttcagaagatatcatgaactatgtaggagttatagggaggcttatttcaattcaatataaggcaaaagttatatcaactagaccttttccaatcatggggctgccttacaaagagcgggccagctttccagtcaagtttaggcagaaacttgtggctgtctgtaaggatgtattagaatgggtgcctgcatcaattaagagatgggactacatacattttctggccccttctcatcttaaaattctctgcttttctttaacagtacagttggtcatctgtattctcagttctgcattcttctgactgcacagaagaatcttctagctattaatgcatacagacaaaagcaagttatcacaaattttgtgatcctgcattcaaacctcattagaatagaggcccatacagaaaggaggtcatatcatttcacaatgctttacatgaagcaattgtttactatctctgatttgtaaagaatgaaaaattggatgtcaggagcaaaggattttcttcaaatacaatgtttatccatgctactttagaggtttaattctctactgaagttgcatttacataaggtattagatattcttaataggatttttcaaggaactcaaaacattgcattggagcatttggggttttggaatttctggaatgtgccacgtccgctagttcccagtttgcagagacaatatggggtgttcatcaacactgtggttcacacgacagctgtgaagctaggctgctggcattggaatcctggttctgtaccttttaatttttgtggccgtgggcaagccacataaatgctccatgcctcagtttcctccttataaagctgtactaatcagtgctggctctgacgatgatgccgatgaatcaccaggcctaagctagaccgatgatacgctattgttccaggcagtgtatttccctaaaaaactggagaccatctcaatttgtgtccaatctgatctgtcgtagagccctgtggttttatgatgcctatagccttacataaagtaatttggtcaacagtatttacagagtgtttattttagaggaattaaaaaatgactacggaagagtgaggcattgcccccacatagccaacatacactttaccaaaaaagaagcaaacatttaaaaatgaaatataatgaaatattttgaaatacactaactcataaacatcctttaatttttaaaagtatttaagtatggatatcatccataattccttttccaaagagcaccagtgttaactaggttataacatgaataggagcttcttggacagtgtttgctttcataaaaactatgatttccaagtcagtgaagaggtattagtttgggcttacaagctggaaaacagaaacagttttgcaagatgtagctaaacatgagatttactttaaaatgcatttactcccagatgcagttgagaaagcataatgtagaagaaaactagaagttatctcaaaataataacaataatttctaaaacaacccaaacgtatagtttcatagtttgtaaaacacttcgaaaaaataccattttatttgtgcctcacaacaatgatgtggggtgggcattaacctcactctaggaagagaaaactaaggctctgcatagctaagaagcgtgtccaaggttacagaggaaatagacatcagagatgggatttttcaccatgatctcatttcttcaaacctggcattctaacaaagctcatcaaattaagtatgaaaaaatgaaatcaatactcatctgatatagcaattttccatcagacaatctcagaattccaaagtcagagtggatttattcagatgcccattattgctatttctgcctgcttagaaaccagcccctcttctagcagcagcggcctggctgttcatgggaggaggtgcctccttactcctcagtccacattgttcacatggagctaaaaccacccctggtgtgggacctctgtcttgctaatcaatctgtctgtctgtctgtctctctctctctgtctctctctctcacatatacacacccctttgcaattagctcagggaaggacacttgatccaatccaggctcactggaactgatggaacgtaatactgagactttttcttttttgagacagagtcttgctctgtttcccaggctggagtgcagtggtgcgatcttgctcactgtgaactccgcctcctgggttcaagtggttctcatgcctcagcctcccgagtagctgggattacagacatctgccaccatgcccagataatctttgcatttttagcagagatggggttttgccatgttgcccagcctggtcttgaactcctggcctcaagtgatccaccggcctcagcctcccaaattgctgagattacaggcataagccacgatgcctggcctgggactttttttttttttttttgacactcttggaaagataggttctctttcttgtaacttcaagttaaacagcaatttggcttgaatctctccacacggagagggaggctctttgggaaaagagccaacacagaggacagcagagccaagagaaggagagccagagagcaatgcagcaaaacagcacctggatccaggactcctgcccttttctgcttaagccatcttgagttggattttttgttacttacatgcatctggaaaagtccttgctgataaattactttaggcctatacgcacagaattaaccaagacagggccacacaaacagccctatttctactagatgttaaaaaaccttctttttattttttttaccactggaaaaagaaagggaagaaggagaaggagaataagaaccagagaattctcctacccttgaaaatttagcaagggcagattataacagccaaaactgacctgtggacccaagaactggactgcatgtaataagaaacattctgaaaatttaacaagtggaaaaataacctgctgggcctctttgtgaacaagctgctcaatgtcaacaagcccaaggcaccactaaatatcacaaggtcaattccactgaaatagggtttttatatattgtcagattttttgtttagttgttttgaaaacagaatattttctattgatatcttctttttctttttttaaatccatggtctggttttaactgcaaacaggacccttggttaagcaccagcacatggagacaaggtggagacgtcagagcttctctagcaaaacgactggaggtgtttagggctgacgggtctatcagaatcaactctggctaatttgccttcttgatgaccttgacagggaagaaaacaatctagacctgtaagatgagtatcaaagcctgaaaaagaatccatctgagtgattctcccacttcttccaattatttgttttaagactatagtacagtattcacaagacactaatcatattgacattagtgttgcccaaaagacacttaatcatactggaatttctaatcccaaagttgtctcagatagagcagggtgtatttgctaaaagaaaattaactgaccatattaataaaaaaggtgtacaatacatcaggtttaaattccaagtatggaagcgctattttccacttttgtgttggtcatagctggctagtggcctagagttcttggcttgaaatagggcacagatatcatcaacattccagatgatctctgaagctcgggtgtcagcttgtcaacttgacgagctgtcaaatcggaagctcctgacggaagagcttattgagtgcactcttgaccttcttttttggttatgtatgatctgtctgtgcttaagtattaagagttgctctttagaccttcatggaaggaaatgttgaaatcatggacaagctgagcctttctgagtagtggctatgtgatgaaaatctaaattaaatctaggcattaacttacggacattaaacaaaaaatctgatgtgacacagtaataggaaaacttgtttagtttggggaaaaaaacactctcttttctttgagacagagtctccctctgtcactcaggctggagtgcagtggcaccatctcagctcactgcaacctctgcctccagggttcaagcaattctcctgtctcagctctcctgtctcagctgggactacaggcatccgccatcatgcccagctaacttttgagtctttagtagagacggggtttcgccatgttggccaggctggtctcaaactcctggcctcaagtgctccgcccgctttggcctcccaaagtgctgggattacaggcgtgagccacggtgcctggccaaaaaagccactttccaaaatgctgttcctttcttggttgtgctattttctgaaaactgattctgtaaattccagtaatgccagagcagtgggtagaatttctgggaacaacaggcctattctctcaggaaaagtatataagaggagaagttactgtcctacttctttcccagacatggcaaagtgtttgcctcatggctttctgggatatccatgctttttaagctaacagttctgtgcacaatatatttccataaagttccaaatttcacttaaagaaaaaaaagccctctcacttgatattttatctaacaatgttacaataataacgtgttattaccatatgatattttttgttacaattttgtaacctgaattggtagagaaatatggcatccattctctgctttccctggctttgacatcattctacccagatccctctgcatcgtgatatatgctccttggcagatgatgtgtttacacaattaaaataataaaagaaaaatgcaaattccattctcaatctacatgctaaatatgggtaacactggaacaaaagatggtctttatagaatgctacaaccaccggagcacttgcccttcaactctctttgtcattaattggcctacaatgagcagggacctttgaattagggactgacaggtgatgggtctgaaccgatagtcatatctgtctatatagtgctttacagtttagaatatgctttcatataaattatctgatacatacaggcctgagaagcagacattatccacattttaaagacaaaaaaattgaaattcagagtcaccacataactcggtccaggtcacacagccagaaagaaaccaaatcagaattccaaccgaagaagccactaagaaaacagcatcgactatttggagaaacaccacaagcaagaatttgtttgtagacagagttaaccccacacctacctacaaagcttttcacaaacatgggagacaggcagcgttctgacacactgtgcagggtctctgctgaaggatcaacaaataaccagtgcagttttgcatttaaggatttcatggtgttaaccacgagttgattcaatcagtttccactaaactactgtgattttctcttctgcttgctgtgcccacataaatggaatctattatggcacatgagaaattagtatttgttgaactgtttttaaaatattttatatcattttaatacagaggcaggcacagggcatcagggactatagaagaacaaggatagggttaggcaggccagggcttgagtcccagctctaccatttaccagctgtgaggccaagcactcaccctgtttggcagatgtgcacataggctcttgtgaggattaaataagatactgcatgtgcaatcccaggcatgaacctggtcacagcagtgcttctgtatggctcagcttctacttcccttcctttaataatatcaaaacaacaaaccttggaagaactaaaatgtaatatacaaaatgctttcaaatagagaagtaattgacctagttgtacttattaatactatttagattgagaaatattaagcttgcaactgaattaattttctaataatttagaaaaagtgtctttagtgcccccaggtaatactgcttttttttaaatcttaggcaagagcattcaaaacataaagattttatattacacactattctcactaatatttaagctaaagtttatgcaaagatatgcatttcttttactgttgagaagcctttgttttgtgaaaatacaagtactatttcattttctcatacgtttttctgtaaatggaagccttctataaatggcttaacttgcagcatttggaaacttttttttttcttgcatgagtttggagaatgtggccttaaccttattcattccatcactctcttattgttcattttaagggtacttcgacttctaaatatcattcaagaaaacttctgaagactgcaattaggtcctaaatactgaaaatattttcctccttctgatatattttccatttactatctcatttccacataactcagaattaaaagctgatctgccatgtgctgtacacacattaatagtgtgtaggacaccttgtttgtgctaaaatgagataacagatgtcaaagtactttgagaatttaaaatcactatgcacattaaggtataattacacatatgtgaatgcaacatttatttattaggggtgtggaaattggggagtgtttcagaacttctgggctaatgagtccagtttagaattacaggctggagaagctatgttttcaacatgataggaaacccatcattcagatgtatttatatcattacattcagttcatgctgaactcaaattttgtttcttgcatattcatttaaaataatttgatgccagagtactgcttatatcagaataatagcaaacaatactcacaatatttgcaaatcccctgtatcccaagacaggtattttaaatattgtttcaaattgaaaaaatcaattaaaccccattctagtgttttattttaaatatctgccaacaaatttaacaggtaaaatggacattaaatttatctcaatttaactttaagcattgcttttccaagttaagcaaagcacctccaaacatctggtaagcagacctcaagaaggcaaaactcctaatgaattattgcggccaccaagaacttaaggtttctggcccagggctagaattccaaatcactctaatggtagctcagctaaacttgaagtagaggggtttctaagaacataaatctgtccaggtgattttctctcaactgcattctcatttcttttagtaggtaagaaagaaagcctgaaggtggacttttgcattttagtgggaaatggactggttaggcaagcattaaccaagctacagtaagcttcttgggagaaactccttgggaaagaactggaggaatggagctccaggttggaaggaggtataactggctgcttgcttgcaaaaattttaattgctaattcaagtctttaggaagacccaactcgattgtctaaacacataacttcaggggaaaaagtatggtctagagagatatgacaggtttttaaaaaagtatataaatttcaaaaagtattacagcaaatgaccaaaaataaggtagaataagaaaaaaacaaacatcaattgagtagttgagtggtgaaaagtcacataaattgaattattcaacaacaagatgacagagtatttcatattttgacaggttaaagcagtatttttaagaggtatgcattcattgctccatgggttttggccttccatactagcgatcatgctcaaaactgcaattaacaccacccagagagttgcagttccagaatccctttttctcattgatcagattcctgtggtgtcatctcctattttctctgcagcagaagtgctgtattgaacagcaggcttttagaaagcttctaataagctcctgatggctgatggagcctgtgtgtctagcagtcactcgatcatcgttagtactccacatgaggggaatgcatgcgtgcacaggtgctctagttcactacgtcccatcagcctgcttatctcactctgttttctgcttttaggcttttttcacctggccagataaaagcccattccattttctcaaggcaagacaattctcataagggatgcatttctgattggagtgacccgttaaaagatttgtgctatttggtactactgcccctgctttcgaaaacctcaggcagcatgtaagggtgcagtcttgctaggccacctctgagtgtttatacataggtagaagggtaagtcgttttttaaaaaaaccctgcagtatatggagaaatttcataaattatgtgagcagctgagagaggtaattctgctatactgcggttgacacagtcaataatagctaatgctcattaaagaactatactcccttacccagggaagaaatgggctcagaaaagacccagttcatattaatacacaaagacaacatggctcaaagttaaaacaaaccacatctctgaaatgctgtcattagagaaatttaaccacatatgtgactcgaaaatataacaagtaacgaaataaatgaaaagtttggggggaaaaagctttcagatgccctatttaaaagagcaccagtgaaaacagtaataaaaattaaaagacaatacctagcaacagagaaagataaaattattcttatttctcctatattttccatcccctttcaataaaagagtctccataatcccaacattgccattgcctgcacaaagaacccagagaacaattcaaaattaaaggagctgaaagaagacacagtatcccaggccttctctccccaaggcatctgcaggcagaatagccatggtttccagaacattctcatcacatttgtctctcgtgagctgcagcatacaatgtttaccagaggctttaaaaataaaatctcactaaacagttgagaaaaatatttaacaaccaaggcaaagcaattacagtcaaattttcacctcgagattcccatcttaggtgtgggaggcagagagaagactcctgcacatcagtctgaacctagaatgaggatgaaaagagttgattctgccaatggttgacaacaaatccatatttttgaatctcagggtgaaatgcggagctacccgcccatctgaatgtacattaagaacagcgccactgttcggttaaggctgactcaagtttctaagcagcaatccgaggacaggctagacatgaacatccctactaaaaacatggaaaggtctgaacgtgacagatctcccttttcaattacttgtgctagaaagcatcatcattttcaactagtcaaggtgacaatatgagaaaacgcaactagtcccagtagagcatttctgtatgaatgtatagacttgggaggaaattaaccacatcacacagggttaatccttccccccaaacttctgccccattatccaaccaatttacattttgtaatctagacttttattactcattttcattatgatttgactttgacactatattattcccttcagggcaaagactttctgggtgcaatgagatcagacataatttcttcagcaggaatgcataacaaggacatgtgtacacattccattcccagacatttctgtctcggtctagttcagatgagcaaggaatgaaaggcggggcataacatggtataaattctagttaggcacggacaataagcatccataggaagctactgttcactattaaaaggcattacctgatatggttgaaaaatatcacaaaggcttataacaccttacctgagccatctgcctctccagttttgatcggggaatatcatcaaagtagttttcatttcttctcctccttgcatcgccctgcatgataatgtgaggaacgtctagggagccaccagtggtgtaagtgctttggctaagtgatggagacaactgaggaggagtgtgattaccactgggttcctgaatggaaatacatcatgaaataaataccatgttctgtggctaacctttggtttcaaaattgtgaaatactgacaagacaaactgtgggggtggggagtcgcttttgaagcaacagccaaggaatgaatgacattccaccactttattaatggcatgatctagtcaatacgtttttcccctaagtatttcaggtcaaaggtctgaaatatcaagagtcaggttctgttttcctaaagcagcatcatggatggtctcaggagggaggcacacctatgttgggcacctctgacactactgcatgtgtttacaggggaggaactgggccctcatgtgggcagagcgtcctcaccatggtagatgccatgatgagaaagctaaaatgagacccaatgggtcttgatccttcatcaaagaatggtctgacaacagggttgggaagaggacacagtacggcaacacagcatgtcacacgcacagactgcagagcagtgcatgctacgacagaggatgcttttccaaggcaaagacaactccatccaagggaaacgggtcaggaggaagatagggggcatagacagctcagctctactatttgcaagtagaatgaggattgggatcatggtgtttctccagatcccttctcctccggatattctggaccttctatgatagatttaggtcctatacttttgcatggaaatctctgtctttgatctttttttgttcccctaaatctcttccagagagccagaatgagaggttcagaaggggaaggaaaaagagcagggtaagtagcaggaaatgactcctctaaagagtcattttagggtgactacactgatggtgcttatatctttctctccttccatgtagcaaaatgaaggcaaaacaaaaatcttttttttttctaatttatttgaggctcctctttctaaggggtgaaatttctatttgtacttttatgactcccaaaactctcaagtagcctccaaatatcccagtgtaccctaatgcccccagtaattaattaaaccagtattcatgtagtccctacccatcccactccagtctctctcaggaggctaagcttgtcctcctggagccaattctcttgcatcccctgaaatccttgcgcattttcctctccaaagctgaatcaactccaaatcctaacagctcctttcctgtcctgccctctgttatcctgacagtggctatgctgtttgctgaagtttattgataagaggcagcccactgcatttcatcacgatggttacgtccgggtgccgtgcttgtgttcatctcttcagaaaagaaatcagaagcaagcaagtgcaggacaaaatagagagcagagtgggcaccccacagctttcagggagatctcagcttttcgacgaattttagaaaagttcttgtaggactcatgaacaccagtgactgccggccacttcttgccactgccatttttgcctggaaatcatctttctcacttcctctctgccctttcctccctcccttccttcacttcctctttatttctctctcctttatacaggttctctttagtttcctacctcataatttttttttttttttttttttttttgagatggagtttcactctgttgcccaggctggagtgcagtggtgcgatctcggcccactgcatcctctgcctcccgggttcaagcgattctcctgcctcagcctcccgagtagctgggattacaggcgcccaccaccatgcccggctaattttttgtatttttagtagagtcggggtttcactgtgttagccaggatggtctagatctcctgacctcatgacccgcccacctctgccttccaaagtgctgggatcacaggcatgagccactgcgcccggcccctacctcataattctaaagtgtagttgaataaaagaaatacaatttattaagtaaggttttagattctctattctgaatttttgaagtgagtaaagctggacaaattttacttcttgaaaaacagaagaccctaaggttaattttaaattgatctttacttaactgtggtccttgatcaattttctttctgtgggtttgaggagtctgacagaaaacccatttccgctctcttggcgtagatggggtgtgggatgggaggtgagggagtggttctttaaaggtagtggtttgtcaggctgaattccattatagatggatatctaaatctcaaaaatatatatttaaccaatctagaaaaacaaatcttgttgttttgattgtgtcaaacaatcaaaagacagattgttttctacacagatatggtaaacttcatagaaaagagccagcacttcctgatctattgcttcagttgtataaagtgcacgtttataaaacctataaaactacataaaataattcttttattttcttactctgttgcccaggctggagtgcagtggtgcgatctctgctcactgcaatgctccgccttctgggttcaagtgattttcatgtctcagcctccggagtagctgggactacagacaggcacaaccacacctggctaaattttttctgttttcagtagaggcagggtctcaccatgttggccaggctggtctcaaacaaatagttcttaagataagggcagagaaccagatgaatgtgcttggcacttaccctgagggtgatggaccgagggggcttctgtgggggatcgtcgtgcagcctgtctcccagagatgccaaaatacgtttcctgtggccaatcaaattgatttttaaaacctgaaacaacatatatttgggttaaatatttcactggagaacaaataatttttatatgtcctaaaacatgtggggtgaaaaaagatttgtgcaaagttactcctgcaccatgagatgtggtgtcacttcagtgtgaccgctgaagtccagaaagattgcagtagcatctggaaagcctggagtggctaagtatcaggggcacaaagagaagggaggatggttctccttccactcatgctgcctgagagcctcattcccaatgcagcagcctcaagagaaaccagctcttcttataagcagccgaaacctcacaggataaaatctgagtctggactcaggcttcagagggacaggctgccctctgtctctttccctccatccaggatatgcagtcatgccagcctcctctaggtattagaagctccacattcattctcaccttggggcctctacccctgctcaaccacctgcctggaatgccccctctcccctctgagattttcaaataaccagtgacttctcatggttctggacactgtgctgctgatgtctcctcagaaaggtcctcccccgcctccttattgaagaagccatgccctcaacccctgacatgctctccacgatgatccatcctcattttatcacactctaaaagcactttctttacaagcttagtgtttgtgttttgttccaccctctccaggtaagctccctgagagcagggcactggcatatgtagagcactattatttcccaaaagcataaaaggatgactaaaaaaaaataagggattaatgaatatgaaagaatgaatggtaatagagatgggagttgcaaaattagagtcatcttgcataaggatacagttagaatgaaggactgcctattggggtagactcagagcctccccaggatggtattttgaatctgaccatgctgcaaagggcacatggtagaagagctctcaaagggaactgagaattgcagcgcctcaatcctcagccccattcccggtgctttaccagggccacacccctttcaatcttcccaacttctctatctggaaggagttctcacttgacagatgaagaaactgtggttccgagtggttaagtcacctacccaagagccagcatgtcgtggctctgggatttgaatcagatttgcctgattccaaagcatgttttactccaaagtatacgtcacaaaatttgggcatttctccaaatgttaccagcttcttaaaaacacattgtatattcatccattcataaaaatgtgtttacctcttccctacctatgtgtagtcccaggatataataatcttgttgggtaactagtttccaaagtcgttatcccatgtgtacatttttctcttctcttttcaagttttaagatagaaggtggggagagcgtttctttggcaggcatcccatgataccttgaattttttttaaatttcaacttttaatttagatgtaggtggtatatgtgcaggtttgttacatgaatacactgagtgatgctgaggtctgggatatgaatgatcccgtcaccaggtagtatgcatagtacccaataggtagtttctcagcccttcttcccttcctccctcccctcctttgtcgtccccagtgttcactgttgccatcgttatgcccatgagtactcaacgtttagctcccacttataagtgagaacatgcaatatttggttttctgtttctgcgttaattaacttaagggtaatggccttcagctgcatccatgctgctgcaaaggacatgatttcattcttttttatgtctgtgtagtatttcatctaccttgactttttatttgcctatttgttggttaacttacgggccttttggcctaaactgatgtagattttaaactcacactacgccctattcctttgacagccaccctctgacccatgtctgttgatgatgaggagggtaaatgttagccaaggtgaatgtccccatgcaccatatccctatgattttataaaaccttcatctccccaggctgattaatcctaatctttgcaagtttgttttcataaagcagctcctcttttccataaatcatttcagttgacatcctcaggactttctcctaccctattatagctgcttaaggtttgctgaaaaaatggctcacaatattccaggtgtaagtgaaccatggctttacatttatgcaggatactgttttctgcttttaatacccgtttaaaatgtccttcctaagcacacgtgatttctagctagccttttagctgcagtaggaataaccagggacaaaagtatacactgactataaaatcccttaattttgttatagctaatagttcaaagccctttaatctaggagggatgatttgagttatttttccctaaatttcttatcttacagttgtccaggcagaagcccatctgccatccttctgcccactcacacagccctatgttagctttttgcatttatattaaccagtttggcatttcactacctggaagagcttagtgatttttgcatatctggaaatttcactatgtattcctttcagatgatttataaatatgctaactaagtgtggccctactgctgattacttgcaggcagcattgtttatacgatccatagaaatgcccttatattcttgtattgtttctgtttttaagcatcaagaccaaataattcctccatctcagaaaaaatatgataaccttttcaaaggtattttgcaagtctaaatacagcatattttctaattctcttttattctcatcctcaattcctttgccaaaggcttctattggatataaattcctcccataaaatcttcaccgcctttctcccagcaggtagctggacctcatgctgatggtactaccttgccccctccctgagtcctgctagaaatgttttttataataaagacatttgcttaattattattattattattattattattatttacaaaactgacactaaataacacataactgtggtacaattgagctgatgtaatccccactattgcttttggtttactctcccacaactcaattttgggcaggttacctgactcctctgatctcaggttttctcacatataaagtgaagaagttaatgacaatttcaaatgtggttgggaagatgaagagtaagttgtgagaataaccagcatagtgcctgacacatagaagaagcaactttcacagtgtgcttattccagtgaatgggttctgagggtgcacaggaatcctggcccagaagaacaaggacttgttcattgtcataaagtcaatcatgttaaacaaatacactggagctttggatgaagagatgtggctaaccttgggaaagccctcaatgaagtaacttatcctagtaggaacatggctgatttctagctattagtctgaggccagacccaatttaaaagaatatgctcttctgccatccacatcgcttaatcttcaataggaggtaagctgaggcactcctctgcactgaagcttcattgctgtctcctccatagagctacccagatgagggtggacggatgaatgaatggattgatggatagatgatagatgatagacagatagacaggaaacgaattaacacaggatggttagtactatcaagatcacctggataactctcctttttatcagaaatgagcccccatcactgaagatactgatggtaacttccatttactgaacattttctatactctagttctatgtcctagttgtgctagaaactaccaagtggttatacacaaatataaatatctcctgtaatccttacaatagcatacaataaaaccattctcattttagagatgcaaaatctgagattatgaaatgctaagtaacttgcccaaggtcacactgctaagaggtacatggctaggatgtgcacctgattcttaaccagcccttcactactctccttgctcttcttcttgctgttaacctctataccttttgacctttagctacactattggttatgtcatcatgaggcttcttaagatgttgcttcttactttgagttatcatgtttaaagcatttatatagggttttgagcatctgaaaacattaaaataattcactttttagtaaggcttatagcattgttaaagctacaggctacaagggcaggtacctcacagtattccctgtgaaatacacatatagaccaaggacaggaaaccctcatcacccaagattcaatccgagctggctcactgtggagtggtagagagggtgacagtgggcttcaaaacgcccaagttgacagtaagaaatccaattggcaaaacaataacagagagaatattccaaagaaagatggtcattatggaaaagtcaagtctgaaggtggctgggtttgccttgagtgagaaaggctttatagcagactgtctttgcaagcagatggggttcctgagtagtggaatcctacaaccccaggcatcatgggtgataaccagtgtgaaaactttagttttcaagaacaccaaagcaatggttactgcagtagagaagaattctgtgttttcgttactgtttgggttaaagttaactgttcagacaagaacataatgggagtaaaagacaaaataatggtaatatattggagattcagttattctaagatgttgaagcaattcagttcggctcaaaaaacaatactgaatttctgctaccaattatttggaggattcaaaggggaacgtctatgaacagagcttacaatattggagagatcaggcacaaataactacattatcacaccattaactaagaaaaattattatacacataagcataagaatgtggctccaactgctgagttccaatagataagaaataaaagttggccaggcgcagtggctcatgcctgtaatcccagcactttgggaggctgagatgggtggatcacgaggtcaggagatcgagaccatcctggctaacacagtgaaaccccgtctctattaaaaatacaaaaaaaaaaaattagccaggcatggtggcgcacgcctgtagtcccagctactcgggaggccgaggcaggagaatcacttgaacccgggaggtggaagttgcagtgagccgagattacgccactgcactccagcctgggcgatggagcaagactctgtctcagaaaaaaaaaaaaaagaaaaagaaaaggaaataaaagttatggcatgtgttcttaatggtttttattacaactattgtaagaggaatgtgggtcaaaggcaaggagtattgttgaaaccacaggagtcagccacaggtgggtatccattcatcacagcagtagccgcctccaggaattttctccagtatcacttaaacaggataattccggaaaccccactgtgaatctcagcaacaggagaataatcatgctggatgacaatcctataatatcacgtcactgctgtttatgtttctgggtttggctgtgggaattctgccagacagtatcatgatatacccttacatggaatagcttacttcagaatatatgtcatagcaaagctgaaagtcaatgtacttaaacttccttttttcttttaaaatttaatgtgatataaaattaaacatgtttaaatttatatcacattaaatttaacatgtttaatttaaacatgatgtaaatgaagcatttttatctgcttttaaaaaagtaaataacattttgattataatagctatactgctttcccattttagacactttataaaatacagaaaaacaagtaagagaaccagtaatccacaaactatatctaaatagatatatttcatttctcccccatgattatgttttgtggtggtcatatcacgagtaccattttcgccttttcttcagttctttaaagctaaagaacttttctacatatacaactctcagtagacattttaactaactccatattatcacattattgtttcagagaagtatgtcataattcactaaacatttcccctatcattgaaaattttggtttgtgctcctttctggatagcaaacattccacatgcttaaataattctatcatcctacaatttccgttctcaatgccatgtttacatagacacagcatagaaaacaccaaagaagactgcaagaatcacacaagtcacgcagaaaagtcatgtagcaacagtctgtctctatgttctgcatgaaatctcaatccgtttattgccggctggaccaactcctgggaaaatcacaaacccacataatgttcctcagtgccatattttgcattttgttatgtttttggagttcagatttagctgacagatgtgaaacagcacatgtagctggaattcttcagagagtacacatgcagcgatgctgggcacacaagcgattctagttctcaccaccaggcgactgcatcctttttatttctagattgttattgagggagggagttcatcctgcatttggaactcccttccattttagggggtagattatttcccctttcctttctagatacttggccaactaaagagaacagctcctatgcaagtctgtagagctcacctggcttcagagtagcctcttctaataaaactgcaagtgttctgagcagttctggtgttcctaaatgccaagaatggaagttgcggtggaaactgatctgctttgttctcatctgcagaactaaaattgcaaataattgtcaaagttttcccccctgcctgataacaatttctaaacactttccacctgaaagcatcaaggcaaaagtgcctgtgtaaaattccatttcgaattcctgcaatcttagaaatcctcacttgaacttgcatacagttttgaccatgacatttttctctcttatttcttgaactgcaataatccatgtccagcatgggatggtgaacagaaagacctcaggagcagaaagtcatgacatttggttcttctcttactcttcttctagctaagtaatctttaatgtctttgagttgtaatataaaggggacaataacagtcttattcaacaaatatttcttggatgcctttcacatataaccaccatgttatgcaatttgtgagccacaaagaagaaaaaatatcgagtcctccagggctctcaatccaggcagtaaaaaaatattaaaaccatgtgaacgtatgtgtgtgtatatttgtgtgtatgtatgtaggcatctatgtatgtatgtatgtatctatctttctatcatccatccatccatctaaatatatacgtctacacagccttcccagcctaaaaggggtttctgtggaatgaatgagaatgactaggaagcttatctggaaattataaagcacagaactaaggtactaactaaggtattatttctcttttaagtataacagaaacttaaaactttcttaccctatcaacaatatttagatattacctttgatatttaaatgtgccattatggatatctctgggtagattttagatccagaatcatgccttccacttctccaatcttctctcctgttatttctttgctccatgtatacacacttgtgcatattccagagtgtctctgcctggattttcattagaatctcacaaggatgaaatcgagatccacctaaagccttgcttgctcaccttggattacatagacctttctctctttgaatttctttagtatctgtggtctaccctgtgctgttgacacatgatacatcctggtgggtatagctaactctcttttttttgcgtatgtgtcttacctgatcaactagactctaggcgctgaaaagtcagatatagtgtcactgcatctcagggtccctgaatgcatctagctcacgaatacaactcaaaggtgatctctaagatctcaactcaaacccctgtcaaggtggacaacaaatgaagcaggggagatgtctctaaaagaaaaagagggaaggaaaataacacctatgtcttatttcattccgtttctactctcaagagtcttctattctttctgagctttggcaccttaattcctacacacagtcttgccacgggtgatgcaaaacttccttacatcccaccatctgtaactctttccctttacctctgccacttcatctaaaaaaaatccctctgactacagtttccaaattcccttttccttctgctattactttccaaaccaactgctactaaataatcagcaaataactgtttgacagatgccaccgaaatacaactgtactaacctatggaaaggaaaagaggttccaagttatacagctccagagagagcaaaggatagtgagaaagagcgagggaggaggaatgcgtgttttctgaatgtagtctgtctcattaaataggaaatactaattatgaggaaatgagatcatctttgcatggaaagagagaccttaatggtataattgcctctgaacatttaagggctctggaggtacaaagccttcttttgtaatcaatgagaatcttaggtttatttgtaaagctctctgaattacctcttgatgaaggtactaattttctgattttcatgtaaacattgcttcagaagattaaaaacacacacaaaacaaaacaataaatcagttcccaactaatttccctgaaagttacttttaagtaaagcttgctgccagttaagtttttataggagaaatttggtttacattgctcaataacccaatcattggggttattgaaggaaaaatttgttacaaaagaaaatgggaagtatgtgcaacatcccagatctgaagttattcttggagatgtgaagatgtgctaatagcatctgaaaagtgcaaatctccctgcagtactatgaatacataaaaatgctctgcatcttaagaagtagagagactgctgttttgctatattttgctaaccatgcaggatatttactgctaacgagggtattttctaactttatttcctttcaatttttgagatcataaaatttatgatcaattatattgtgtgactgatgctctcagtattgtaaaggaaattatggttaccgaaattcattaacatatatccatataaaataaacagaaacacgcaacatacatgaacacacccatatttgtaaaagaagctctaagacaaattgagtctcaagagacaatcctaggtaagtgagggcctggttactccgtttttggattataagtggtcttttctgctctgttgctgctctgcccctcttcttgaggtttagctactttaatggcatataacaccctccatcagcagacagaatagtgaaagaggcagtgaattcaatccagccaattctgtttctgtcagcagctctgataaaagggttttatgtgggaggaggtaaaaaatctacctaaaactagctaaactaaagttttaaaaatgcatccacagattttacttagcctagccagctactactgcactttagaattggacatttaccatatttcagctacgtatggaggcaaaaaggatgttaaggttaaaagaaagtattataaggaaagcagaggttgagtcccaaggatgagttcaaaaagaggaaaaaaaaaggggtaacaacagtgagagagatttcttatcgtcccttttctccctttgtccccacccccaccactatccccttccttatcttctggagagtcacatcacagagtagagctaggaatcaccctaaacccataagaatggctaatgttagaaaagaatgaccctacctcggatgataaggatgtggaggaactggaactctcatcttgctggtaggattgtaaatggcacagtcacttttgaggaaactgccagtttctcaaattttgacccagttttctaacatataacccagcaagttgactctagctagcaactcctagctaaaaatgaatacatatgcccacataaagatgtgtacatgaatgtttaagcaacattattcataatagctaaaaattagcaataatccaaatgtccgatcaactggtgaatggataagtaaaatacagtatattcatgcaacaaaatactgcctaatgatacaaaggaatgggctacatgatacaggctatagcatcaacagacctcaaaaacattatgctaagtgaaagaagctgcacacacaagatgatagaatattgtaggattccatttacatgagtttctagacagcataaaactatatgtacagaaaacatatcagtggttatctggagtaggaataggagcagggattgactgcaatgagcataaaggaactttttagggttatggaaatgttctaaaatgggattgtgttgatggttggatagctgtataggtttactgaaatttacccaactgtatacataaaatgggcgattttcatgatgtgtaattaaattgcaatgaagttgtttttgaaaaaagaataatgctgggagaatgcattcagtatgcagtatcgtataaataaggccattcctgaaggctgtaatccaggctgctcgagaagacctctgttgtcttggaatataccacttatcagctggatggaagggtgagcaacatatacactgcaggatgtcttaaggaaaatgtgacctgcagggtagctttgttctaggagcctagtactatttaactataggctaatagatcagtagcatattctttattataagtgcacaatacagtaaattagtacgactttcctatgtatgtatatttttgagggtcttaatcctccaagtcataacacttcagtaaaaatgtttatgctttctaagtacttacaacaaatggcttatggatgtttgcggagtgatcactaggagccaacatgggttctctctggatgggtaacaggtggtgatcatgagatgacactcaagaaccagagaataaggttgcattctaagcaccaaattaatcacatcaacagtgctatgatttgagttttctctgacaaaaactcagctttaaattggatctccaatgtggcagtgttggcagatggggcctaatgggagatatctgggtcatgaggtggcgaatcctccttgaaataacttatgccattctctcaggagtgagtgagttcttgccctggcaagactggattagttgtcacagggatgaattagttcctgcaagagtgggttgttaagaagccaggacatcctgtgggttttgcctcttcacacgtcagcttcccctttaacctttcaccatgttgtgatacaacaccagaaattctcaccagaagctgagcaggtgctggcaccatgcttcttgaacttcctagcctgcagaaccatgaactaaataaaccttttcttctttataaatcacccagtctcagatgttctgttatagcaacacaaaacagactaggacaaacaaagcgactggagtcagaatgactttctagcccatgaagagtcaatgaaatagactggcagtgtgactacagtttaatcggtgatactgaaacccagctaaataaagaaggtgtgccagggtggggtggagaagcaagggtagagggcatattgaagcagtgaaactatctagctttggcagcagcatggggagacactgaatcttaacataagtaagctccctgattactcaaggggttattttatcaggttttgtactgatctaaatgaaacatccctcaaaattccctttccttcaataccacatgtaccaggaagcagtaattgctgaatcagttttctgagtgcccagatatgagaagaggaaatgttgaagacgggggatcagggaggggagcatttggtcagagaatccttcccatcatgtattaacagaatggacatcttgatacattgatctctccttaattaaattaaatccacaccaccgaggcacagaacctgctcaggagggcatagtgattaagagcagggcttggtgtcaggatgacctgagtgtgagtgttggtactggcatttactctatatgccttttggtcaattacttaacgtctctcagtatcacctaacttgtgtaaaatgatggagctaagaaacagtattcgcctcttagtgtaattgttaggattaaatgagacatatgcaatgcatttagcacagtgcctggtataaaatgagcttcataaaattctaacttcattcagtgttttgattaagcccagtttctgaaatggaagggctgagccctcccctggaaccccaccagaaggagctcagcagccagccatgcaccttttccctggcaacaatccctgcatcatcagccactcttcaaactttggtggcctcattgaaaatcagtttttgccaaactttattgactttctttttttgacaggtattagtatgaggttgacagaccaggagaatgtcatagatatagtgtctttgattccaataaagcacttgatgaagtctttcattatctgcaagatggtgggctctatgagggaaaaattaagtggattcacagctggttgtacatctatagccaagaggcttgatgaatggctctgtcataacctgttgggggaccactgattgaatgccacaggctctgcccctggattctgctctattcaatatttttattaatggcatcaaaatagacataagaagaatacttatcagatttttcaatgacataaaactgtgaaaaatatttaatataataataggctaatgtaaaattcaacattctctcaacgggctgaaaaggccaagctgacaccaaaaagatgcaatttaacagggataaatataatgtcttacattaaggatccaaaagaaatcaattgttcaagttcaagatgggaaagatatggctgtgccacagttcaaagaaatagctgaatttttagttaaacgtaggaaggggtttagcagaaagaatgcaaaagtatgggtctaatggggagggaatgaacccatttagaataattttaccaaataaataatctcatttaccttgctattacaacctaacaaggctggtaattaccttaactttagaaatgaattaactgaggttcaggaatttaaggaacttgtcaaagtgatgacaaaatcaggatttgaatccagttccgacttccaaaatttgtgcactttggattcattctatcttgctgccacttctctcccagagatgctgtgtggctcaagtgagacaattttaatggacgtacctagcacagtgcctggctcctaccttctgctcaaaagtggctgattatttttctcccagagactcattaaatgtaaggctgggtgcttatatgaacaaccagtactttattattataatatgaactctgcagtctattctaagtcttttcaagtttatccattaatatacctagtgcagaaatgattctgttgatttttattctctcattcaccattatttccaaatccttaatgccagaagaggaagtccagcctggaaaaggcactggaaaatttgagggcaatctaaaaatctctgtcagtcagtaatgattcccagataattaaaacttttttttttttttaattaaggtaactttcaagggctgcattagtggttcaatgctgcgtattaacatgacaaaaacctctattacctttagataatgaggtggtgtgttaagtaaccttagtacaatgatatgcatacagaatgtacaaaattttcaattaattcaattatttaattagtttagcttatggttaaaaagatacttttttttctgttgttggaggtcttattagaattcttcatatatatatatatacacacacacacacacacacacacacatatatgtacacatacacacatatatatatatgtatattttgttctttcctgcctaagggtggtttattgacagtctttaattcttccctagatatctggaatactgcattgcatctgagtcatgctctgtgtagactatttgtcactgggccacagtgctgctgcaaaaggtggctgaggaatgcacactggctccagcagtatcctgtaagatttagctcttttaaataaaggaattcttaggagcagttagttttcattgcctcttgcactaaaagcaaggcctgacaacattagctatccaaaagttccagttaatgaaggtttcattgtaaaaaagaatccatttgggggaaggtgcaaactctttgtaattttctctccctctttctcttggcctaggccagccatggttcacaaagctggagaatggagaatcattagctgctgatggtgctggtcatcccaccctggcaaggaaaggaacaggtatgttgagtgaccaggttgacctgtgcagtggatgagccgaaaacctcttttgtaagctgttttgtaaagatatggagacaactgatgattctggaggtggaggatgctttgagggccagaacacacactctgcaataaagcaggtcacttccttcaggttttaagctaaaatgtgaacacatcagtggactttcacataagctgtgctttctttctggaatgtctccttttcctcttctccatctagtgaacctctactcatcttctactctttcgagttaaatactacttttgaacaaataatagcaaaagaacaattaacggcaacagaactttggaatgacagttatcaaactagtcctgatccataaacaaaagtctacttagcacattgtgtgaaaaaatgaagtctctttgtttttattttcttaaaccactttattccagtatgactgacatgtaaaaggttgtacgtatttaatgcatacaacttgatcaatttagggataagtacatacacatcaaaccatcaccaccatcaagactataagcatacccatcagctcccaaattttcctccagctcctttcattattattatcatcatttttgtgtgtgtggtaagaatacttaacataagatctcctcttctggcaaattttaaatacacaatacactattgttagttactggaactatgctacagtagatctctagagcttatttctcttgcataagtaaaattttctatttaaccatcacctttccatttctgcccccagcccctggtaaccaccattctactgcctgcttttacgggtttagctatattagattccacattgaagtgagatcatatagtatttgctttctgtgcctggcttatttcacttagcataatgtccttcaggttcatccatattgttgcaaatggcaggatttccttctttttcatggccaaataatattccatggtatgtatacactacattttctttattcatctaatgatggaaatacagattgattccttgtcttaggacattgtgactaatgctgcaatgaacacgggagtgcaggtatctcctcaagatcttaattttttttcttcttttgagatggagtcttgctctgtcacccaggctggagtgcagtggagagatcttggctcactgcaacttctgcctcccgggttcaaacgattctcctgcttcagccttctgagcagctgggattacaggcatgcgccaccatgcctggctaattttcgtatttttagtagagagggggttttgtcatgttggtcaggctggtctcaaactcctgaccttaggtgatttgcccgcctcagcctctcaaactgctgggattacaggcttgagccactgcgcctggccaagatcctaatttaaatttgtttggataaatatccagaaacagaactgaagaatcatatggtgggtcaatttttaatacatgtttattttgtatcaggttgcaaatttgttgatcaaaattatgagttcaagatgaaaaagtgaaaagtagagcaatgctttctaagaaatagatactgaatcatcaaatggaaaagtaatatccccacttgctaatttaattcatcataatttacaagtctctaatgaaaaccaagcaacaaacaatgacttagtatttgttagaaaacagtttaatctccagttgtcactgaactcattagcaacatatgtcattcacacacagtgaggaattattaatttttcatttcaagaaaattgtcaaattaagctggatagaataacaacatacaataaaaaaattggtaatttattcttatattgccctagaatgatgatagtgtgtggcatgtcattaattaataaacataatattattcacatagtgggcccttgatatccatgaaatgtgtaattaatgatgaaaatgctatagtgttactatcacacttactgatcacatcgaagttttttccacccacacttaaattaaatctccctgaaatccctggttcaaatttcatgagattcaagtaatttgtgatttttttttttttttttgatgcggagtctcgctctgtcgcccaggctggagtacagtggcatgatctcagctcactgcaacctcctcctcccaggttcaagcaattctcctacctcagtctccagagtagctggaattataggtgcatgccaccatacctggattaatttctgtgtatgtgtggtttttttttttttgagacggagtctcgctctgttgcccaggctggagtgcaatggcgtgatcttggctcactgtgacctccgcctcccagatttaaacgattctcctgcctcagcctcccaagtagctgggattataggcgcctgccaccacccctggctaatttttgtatttttagtagagatggggtttcaccatgttggccaggctggtctcaaactcctgacctcaagtgatctgctcacctcggcctccccaaatgctgggattacaggcatgagccactgcgcctggcctgatttgcgatttttcatgaagaattttttaaaggccaaagttcatcctcaagataagaaaaatgattgtttgccatagaattcttctaatctcaacttttaaaagaatttattaacatttcaggtcaaatgcctcaaatgttgaaatctcatattttaattctttgagatgaagtgttttccccagcatttcttttttttttttatttagatttagtcttaactcgcatcaaggtttataaaaaatgatatttctatttcatgagcatggacagaatgtgttgaagcctccctgcaggaaaattatgagcagaggtaaaaatccttgcagcattcttagctccttagctgtagtgtctcttagagaaatgttgcatataaggaatgctaattaaggaggctgggagaaaagagatgccacctttccaaacacaacatttcaaaaacaagtattactaacatggtggttttatgaagcacttgaatcttacataagtatggcttgttttttgtttcctaaaaaaagactgcatttgagcaaaccaaaacccgagtaatttaaatcatgaatttcagagaaaaaagttttgcatctagctaggaacttaataaaatataagttttcaaatactttttttttctattttaaaatcaggtacactgctatttgcaaaatctctagtcaagtagaagcagaaaaagaccgtcttaattttaaaagagtaaccctgctcccatttatgaggatttttgcagggagaaagattttataagatattcacttcaatacaaaagggcttaaattcaagagtatttaaactttgaatttcaacttatcccttggaatggcctcatggctaatttcttgtctatatacaaggtcaaatagatgtatgtctttggttaatttggactgactgccaagcaatttattaggaagctggaggatctaaattgatcatgaagacaacagaataaatgggctttgtctgattacttccgtttacctgatgattaaatcctgcctgcagaaaatttatgtgacttccaaataacacagagacagacagacaaccccatgacacactatttaaaactcttatcttcattaaatgaaaaaaaatcaatttcaaaagtaccttttgttctttatgtctttgttaaattacgtctgaggaagtaaaagagcttcttgttgccgtacttcctggtctattgtcatatatcccacaattggagactttttgcaagatgggtaatttggatatcaaatatgagaaattataagtgcctttagcagatactgcttttccaagagttcagtgtgatcttggataaaaatttgggcagatggcttcctttggaggcttatacattgttttccacaaaatgtagttgatggagaccagagaagcattgcattttttttttttttttttttttttttgagacggagtctcactctgtcgcccaggccagagtgcagtggcgtgatctcggctcactgcaacctctgcctcctgggttcacgccattctcctgcctcagccttctgagtagctgggactactggcacacgccgccacgctcagctaattttttgtatttttagtagaggcagggtttcactgtgttagccaggatggtctcgatctcctgacctcgtgatccgcccgcctcagcctcccgaagtgctgggattacaggcgtgagccaccgcacccggcccagagaggcaatttttaagatggaaaaaaaaaaaaagattctctccaactctctttgcccagcctgccaatgctcccattttcacagcacccaggccagccaagacctaaccttatgcagaaaaaggaacaatgctttaactaggcacagagttctattacttttgctacctaatatgcaaaacactaaaggaagagggcttattaaagaaccgcagcatgttttgtaaaagttggtcactgagtctttgacagaactgctacagtactacagttctaagttcctactggcagcttctattttgagagtcatgccttgatgggagctacaaacaatgcagcccacagtagtacacattcatccatccattcattccttcagcaaatacacattgagggtggaatgtgatggctgatgttaagttggttaggagcacacaaaaatgcacaggacatacttattgctttgagaagctctgggcctagtggggaagatgaagtgacagatgctcttagggagtaggttcagagtggtgtgaaaagtagggagtggcaatctctacctggggagctggggatggcctcacggaatagaagacaggcttcagggctgagaaggagatttccaagtaaagagctataggaaggcgattctacacagaggagacaccgtgtgcagtctcagacgtgtgcaaggacacaacaggacatgtctgtttatggtttcaaaattttacttagttccctattaattttgctaagggggaaccatatgtgtgagtagcaggactgggggatatgaaggtgggtcagagccagattgttaagagccttcaaaaggaatttggtcttcaacttaaacaaattagaaaatacgtgtaaagtgcttggaaagatgtccagcatatagtgtatactcggtaaatacaagctgtttctgttatgttgaagtagacaggaaaccaaccaaggttttaaagaagggaaaggatgctcatgactataatcccagcactttgggaggctgaggtgggtggatcacgaggtcaagagatcgagagcatcctggccaacccagtgaaaccccatctctactaaaaatacaaaaattagctgggcatggtggtgcacgcctgtagtcccacctacccaggaggctgaagcagcagaattgcttgaacccaggaggtggaggttgcagtgagccaagattgtgccattgcactccagcctggtgacagagcgagactccatctcaaaaaaaaaaaaaaaaaaaaaaaaaaaaggagggaaaggatgatgatggcagagttggtttataacaataattctgatgccaatattgagaatgggctgcagtggggaggcactgtccacaggccaggaaagggaaataattcaaatagtgaggataaggctcagcaattagaacttgttcattactaaattcccagggtccaacatagtggctacttgcagtgggtgctcaatgaatagttgctgaatgaataaatgaatggcaatgggaggagggagcagatctgagaaatctctaggcggcagaaacagcagggttggtgagtaccagatgtaggcgttaaaggagagggaggtttttttaaggatgactctggaaattaggcttgggaagatggtgttgccaaattctgcaatcaagtagaaaggaggaagaacagggttggcagggaacatgaggctctgggagtactactttctatgcatctgctgggtttagcctcttggagtgttgagaaaaagtgggcaagggaggacaaagaaccctcacatgggcactgagctgggtgttttcctttttactgtgtttaatccccacggactatgagtttgatattgttatccctgtttacaggtggggaaactggggctcaagatgacacattagcgaggtggcagagcccacattaaaaacacgtatctttctgccacaaagcctgagctttttccccccctccatccatcaaattgcctcctccattaaaatgaacatttggaatatgatatattccatatttagaaggctcgggggtgcagggtgagtactttgcaaaggaaccaaagcctaacttctgttaactttctgcttcatcgatactccaaatctgtcttcctcattcacagagtccctatgaggatccaaaaagatgtgagaaatcttttgaaaaatataaagcgttctataaaaacaaggtgatatcaaaaatgagaagaaaaatatgttcagattcttgttaaggaattctagaacactgtaaaagatgacagaagctggatactgtcttaggaccatttgactggcaacagcctctttccaactatggttcagggagcaggttgaggtttttctgtctttaggggtcagtcttcctaaaatatgaaaacccgggtttgaggtatggggaaagaatgaattttgccttccaaaggcagagtttacaacttgacggctttcactcctctttcaaaaataaacctaaattcctatcagttgtctgcagagttccatcagggacttggtagagtggcccctaactggggagcaggaattatatgtgcttcctccttgttctgcaaagcctctgaacaccaccgagggcccatggagagcgtgatgatgtgtctcttggcccatcacaacgtaagcatgctgagcagaggctctatcccacatcctcactgtagccacagtgtccagcaggaaggggctcactgtatgtaactacaagaactttcggtgtttgcattcttccctttgctctttaaatggctggcttcttcttcccactcagttttcagcttaggtgccacgctgggagaggcctcctgtgactgccctagttaaatagatcccccctgctactctctatcactgcactctgtcatttttcatgtggttcctttcagaatttataatcacacatttgcttgtttggttatctgtgcctccctctcaaaccagactgtaggcttgagggcacaaagcatgtcaactctattcagcccagcatctagcatggggctggcatgtggtaggcattcagggtctaactgttgttttaatgaacaaacagacctaaacctgagatggtgggacaaccgacaggaaagcagaaggccccctcagcactcgggggctgttgttccataatcaggcttcattatgatctgggaccagggatggagccgtggattggctcacatgtggactgggcccacccctctggactcatcagcaagacatgcaaaccacatgagtcaatggtccacacacagccccaaaggagaagaacacaagtatcactattcctcaactttggagtaggttccttggtctcctagttaaatatgcatggcacataaaaataattgtgcagacagaaggactcacagttgcttaatgtagaccaggaaagtgtttgaaccattcagtgggtggtgcgactcctaggggaaaccagccacgggtgggaatagaaactactccaggaaatggtactgtatggaacaatttacatattttggggcatgggaagttttggaaatgcatttgttctcctccatatctaccactgaaataaatccttgagatttaaaatgagtagatgatatttagtaatatgactgaaaaatcacataggactcatttatgagccaggctttatgcgcaatttacaacctgtatggaaagcaacaccatcccctgttttacaaagaaggaaacaagttcagggaggttatgcaagtctgttagattttaacacttgcactcccttcaccatggagccaaagcctagacttaattgtttagaatatcattctaaattgctttttgcaatgtcatttcttatgcatttcttacacaccttttaggtgccaggaacgtatttctaaaggcaggatagcattgcagaaatgctagcctccaagagatggggtgtattttccattgagaagcagaattaggggaagggtagttttacctcctcagtgtcaactgaaatggcagtcattcaacatttcactcatttcccatcagacaattttaatctgaataaagtttttaaaaatctcttggccgggcgcggtggctcacgcctgtaatcccagcactttgggaggccgaggcgggtggatcatgaggtcaggagatcgagaccatcctggctaacaaggtgaaaccccgtctctactaaaaatacaaaaaattagccgggcgcggtggcgggcgcctgtagtcctagctactcgggaggctgaggcaggagaatggcgtgaacccgggaagcggagcttgcagtgagctgagattgcgccactgcagtccgcagtccgacctgggcgacagagcgagactccgtctcaaaaaaaaaaaaaaaaaaatctcttaagaaaccatctccttacaaattcccttcttgcaaaatacttatttttcagtaaatatcttcgttgacaattctaacaaaggtactcaaattctatatcctggctatgcctgtcaagagagttgaaggaggcagtggccatatttagagggccaaaacctgttcttctggtggtatattttgctgatctgctgatcttgaaggactccagtgccttaaatttacccacatgtcatttattgctgcctaatgtgcttattcattattttttgaaaatagaagcatattcggaaacatatttaattttacgatgttaaaaatgatcacttctggttcttcaccagaactatatggagtacctggaatacagtaggtactcagtaagtacactattaataaatgaagaaaatatacgcaggataaaataaactgtttttcataattctatccatatatgatttttaggattgtactggcttaaaagctgggactatacaaatacatcatcaatgtgaaaagctgggaaaatgggaatgcgaaaatcaaactggctcttggccagtgattttttttaaaaaaacaaggtcttcaaatgtttgtaaactgcaaaatgtccttgttgtccttctccctttttttttactactggcattgtcatacaaactttgtgtctcttccaaattagtctgttgtttgggatccttaactacggagagtgtcaactgtgcgtctccaagacaaacaggttgatgcgctgtctttctcagacctatgctttaaagcccaggctagggtcatgctctgagactagagcattctgactttctctggtctgctcttttctggtccttgattttcttatctgaatcatggggtgtccattgtttagacggaaggttgcaaatataaattaaataattcctcagcaaacaatatctttctgtgaggtgcatatatcagtggctaggaaaatatctgaggcctgctacatcatggtttagtgaataatttgcattttatgatgtatatacagtgtagctatgaataatctgccagaaattatagctatacatatataagccatacactcactaatggtaacccattctccttatttttgaacccattctcggtaccagtaatagagagctcactggctttgatttgaggcagacctaggtttgaatcctagctctaatatgtacaggttgaatctcagggaaagaattcatctttctcagctttagtttcttcatctgtgaaatggagataataccaacttcataggcctattgaaggcatttaatgtgttgattatatgcatgaagactgatttgttaacaaacagatgatttcatgtgtgtgtgcatgagttgggtgcagccttaataagtgttccccttctcttctgttttgctatttaatgtgatggtgaggagagtggtcagtgtttgtctgtctcttccttctagaagttagggtggcataagatgaggatatgggggacagcagcctcagggagatactgaataacctctgggagcctaggaggacagatgcttgacactagctggggacaaaaaaggaagagcccaaacagtttttaaagcagaatcttctgtgtctagaagaatcaataggaaggtgcatcatcaaaagaactagagaacacaaatgacagggtatgacatgagtgttcactttcattaagtaaacactgctggggtttacttaatacctggtgagagggaaaaaaagcagtattactccacaaacatttgttaaaatatcaactatgtgagcaagccatacaatggagaggcaatgattcctaagacataacccctgcacacaatgattcctgacataacccctgcacacagtgagttcttagtcacaggggaagcacacacagacacaagagggctgtgattaatcctatatgaaaggacaacatgccatggagcacagaggaggaagtagttacttctaagaagaccaaagacattttcaaagaggtgaggatattttaagcgaggtcttagaggacgctgttcacagggaagaggagatgtaaaagcattctaggccaatgcacctgcatgagaggagtgggatacggtgtgagcaatgcttggagaattgcagctatttggatactgctgggacataatgacctcggcagccaggaattgtggttacattgcagggggccttgaggctagagagagagaactgattgagcttgaggagggagagtgggaagggacccagagcacagatggagttattggctttggagataaaaagggacacatgtttctctgagtaggtgagtctgggtgttacttggataagtctagagaagaagagacagtacgttctaacagaacatgccttgttaccttcatgctctcggtgtagtgggaggcaatgtcactggttgaataaatatgaataaatgaatgaatgaataaatgaatgaaggtggctagggtagaggattaagaagcattaaaatgaatatttcaagaactatttatgggggtcagtaaatataatatttctaaactcaaaacttctaaactcaaggtatttataagctagttgaagatgtaaagacatcatacatcttttcaaagcacaggaagttaaatgaatggttcctaaaatatgaatgttcagagggaaaagtacgtttattaactgcttgacaaagaagtatgtagctatattttgtgtaacacactatggtgtagtcttatctttttgggtatgtttttctttcttaatgttaaaatatttcatagctggtccatgtaactatagttatacttttagttttactcaggttcccgataatgtttgtcgcacagacaggtttgtgtactggttttaataattccattgtactttctacctcctcctccgcccccatccccagggtcttcaggtcacagttgggacctactctatgtactctggtgctctccataagcaaatgggatgatttctctgaaaagacagctctagattatagtcctgaaaaagagagctcttgagtcaatgaaaaaatcatagtttagagtagaagagaaaggtaagtatgttcagaggaaaagctggtcagatgaatgtaagagaggcttcttttatttgttcatttaattttgagacagtgtcttgctctgtcagccaggcttcagcgaagtgctgagatcatggctcactgttgccttgacctcctgggctcagccattctcccacctctgcctcccgagtagctaggaccacaggcccatgctaccatgcctggctgtttgtattttttgtagagatggggtttcgtcatgttgcccaggctggtcttgaattcctgggctcaagtgatccgctcgcctcagcttcccaaagtgttgggactacaggagtgagccaccatgcccagtctcaagaggaaattcttttagcagagctttgagagataggtatggaagaacaggctggggttagagtatatgttgctaaggaatctgaccctcactccatgggcaataaggagccatggagcagggatagaacacttctctggcactactggaagctgtgatgtccaatgtatgctctctggaagatctaactaaacacaaccttagcacttctctcaattttctttgaaaaggcaaatcttgtgagtcatttgttctctgtaaaatgagagaggaacatacattatcaccttatattatcgatttacattaagaagacttccggattctcttagggttgttgtgtctttctaagatttcaggcaggtgggtaaatccttattttcatggattttctattggctaaaggaacgctgtgtgtagtttgttggaatatactttgtagaagacattcttgcccttgtgaaccagtttgattcccgaatcacacaagtgctgggttccagaagagattttggatataacgccaggatttctgaccctacagctaagaataggcagcaataggaactcaagttacaaaaaatgacttcaatagagcattcacatatgtgatggtatcagagcccaagtcttcaaagagaaatattttgaaacttctccctggtttctggcaagagcagcaaatcttgatttttcaggcctttataaaaataagaaaagactaacaattttaaacctgggcattaatcaaccatttaatgatgccaacaaatgagttttactgtaattcagtgcggggagattaaaggaaacctaagagccacaaataagccattatgaacagtttacagtgattgagtacataagctgtgattaataatgatcagaagtaaatctatgaataacaacaaacagaaaggacttgttagattgagaattttatcagaaaggtataatttggatgttgactcagtggtaacaacaggaaaaataaattacctttatgcattttagtttatgaaaatcaaatagataatatatgaaacaacatttaaatcgatacagcccaggagatataaaagtataggtttgtgtggtcttctaattaactgacatttacacatttttcttaagatcactgtaagcaaaatgggaaagctctctaaatttttggccttttgggagggaggcttttcagtcttgctcatatttgagtcaatacactgatgtcttgacttgcgaaaaaattttcacatccctgttttgggctctcatattttctttattacacaggaaaaaaactttattgcacagacaaacagaagttaaattgaattgattttataagctgcaataagtacagctcccagaaacaaatgcaaatggaatgaacagttcttaccatatgtttcacataggctactcacgttttctctcgttccgagatgatttcaaaaaacctgttctgttaatgtatgtatgaaattctgcaatcttaaagatttaaaaacctatatgttttcaaagacctgaatatcctgatacacatcctttcacacctggatgccaaacacatacactgaaatatattctatgaacaaaggaatttgaaagggaccacaaatttcgcattgcatgctgaagctgtcctgtgtcagctcttcaaactggggcctctgaattttaggaaaaagtgctattattctggttcagtaagtttgaccctttgttgtctatctctgctccttagagacacaagcaggccttgtgcttactaagtgaatattaatatcttcattaaaccttgatagacaagcacactacagccctcatccaaaatatgcacaaaattagaaggcaaaaataaaaaaagagccagacattataagcccgtcaatggaagcagagagccacaccattaatggtggattgaaaaagactctgtgttgttcacctcccacgtataaatgagaacacacggtgtttggttttctgttactgtgttagtttgctgaggatactggtttccagctccatccatggacacagggaggggaacaacacacactggggcctgtcaggggtcagggggagggagagcatcaggataaacagctaatgcatgttgggcttaataactaggtgacaggttgacaggtgcagcaaaccaacatggcacacgtttacctatgtaacaaatctgcaagtccggtacgggtatcctggaacttaaactaaaattaaaaaaaagaaaaagacttcctcagttttttctctaatggcctgaagcaaaaattactctcatttcctcttcattgatataatttgtttttgagaggtgaggggacaatgggaagagagtggttttaagtcactataaaaagattattgacagatgcgtggtaaaatgaaagactcaaaaattcctgaccctttctcccctccagagttaggtaggcgggaaggaccccaaacttccatacaagagtctcttaaggtaaaattaagacagcttccccttcggagtttatgctagtatttcataattttccagccaagagctggaaattatgaaatagttgcataaactctgttaatatagatggatcaggctccaatcttgattttgccatttctcatatcatttttctagggctgagggggcgcacttcttggagtccagtttctgatataaagagaaaagccatttagtgtcttggaaaaaaacaaaagaaggaaggaagggtgttgttgatttaatagatcacccttattgttctaatggctccagatggctctcctactgtgtggatgagatttgacagtgccttcttggggagaaacagaagacttcactagcttcgctcagcaaatgaccactgattgcctggaatggaggagttaatgtgatcaattaacaatgtttgaagaaaaatgatgtttgccagctgttgatttcatcagcaagaaaaagcccacaataatcatcttagaaaagaacttaattagttttgatcctaagatagcatgcaaaagttctggactaatttctagtctgaagatattcataacatattagagctggcatgaactctggtgattactagaaaaaaagatttttaagtttgtgaaaacagagatgtgctcaaggtcacccacagttaacagaaaaactggggctgaatcctggggcttctgagctctgatatgctgctttttcccaccacaaatcacagtttttgagattcacactttgaaaagaatgatccaaagtaacactgccattttggggtgagtgttctcttatgacagatgagtttttttttaccttcctgtttccatatgtttaaaatgctattagtatttcaaacctcattttctttctttttaaaaattcagccatgattttagagtgacagatttgccatatcaatttctaaaggtaagtgtttgggtcagtttgctttttctctaaattgtgtttgtcatccctcagtgtagtaagattttggtgtggttatgctgacattaaagtttccttttcttaaaataaaactaatgacttgaccttgatattgtataagagtacaggccctagggtcagtcatcctgggttcagaacccagcctaccacttctcagccatgtattgcgggagagttatttatggttccctacatttcagttctctcatctataaaatgggaacagtaataatcccattctcaaagggttgtttgtgtgagaattaaatgagctgatctatgcaaagtacttacacagtgactggaacatagtgaacactcaatgtagctaacagttattattattattactagaaaaaaattgaaaaataattttatgtaattgttacttacatgagtagcggggtctcagcttcccaacacaccatgagaatatgaaatttcatcaataaattcaaatagacactttatgtaaaaccctttgctcaaataatgtaacttagcaatgactgacttttagatactggggaaatgcattcatatgaaccagtgcgacattctgaaaactggttcattgaatcccaataatataggttcttactctcaagtaggaatcaataatgcacatcccctctgtacccacatgccccataaaaaagctgttcaggacaatcttgctttatatattatacacattcagggcacatttagagttctgaaatttgaggtgcaaagtaagcattttgatagggatatttttccaaagaatgtttttggccccagcataaaatgaaaaatctctaccacagacagttgcatttcatggtccaatatagtctctgcatgaaaaccaacagatcattctacatgtctcctgacacatttacaacaggcactctgtgtaaaacccattcgcatcactgggggttctcaccaattcttaggcccttgacttatttgtgactgggatacctttatcacaaagacatgctttacagatattttcacggacacaagctattccagtcttgtcctgcataattaagtttttacattcagtaagtagagttcacctcttcctcctaatggtaagtgtttattaaccataatgactaataaagaggttctggcctccgtcacctgagaagaacaaaacagtggggtttttctgcagctcggctggatcccagcttctatgacctctgctgctaacaggctctccacaggcaatgaatgggagacgccagctatgcaaattagagtactgatgttccttgtcagctgcaaagcccaaatggccctgaaggtgacccaagtgaggcttctgtgctgtgtgcctggttaggtggagaccctgattagtctgattatggcaacaaattttttaattgctttatggggtgcatgaaaattatatgtttatctccttttattgaataaagtgtgttggttgtatatgttcaatgttggtagggaggaaggtattcttatatataaagagaaaatctgttactctttatgtcagatcagttgatagatattaaacaaatcatgttgttttctcatattgagtatagatcactaatgaccagctggaacagaagtaaacttgtacattagccagtaatgaacaaaatgctaaagatataactagagaaattctagaggtaaggaaatagtccacatatattaatacattttttcccacagtcatcttggtagaaagttgaccgtgatgtcgatgatataactgggtcagacaaataccttttaatagtctgtattacttacacacgcatacgtggcaacagatttaccttagacataaacacgagtttatattcctggaggtgtcctagaagcatgctgactgttgtgtcctcagtattattcacttcaataaccgtaagagctggcgttctctccaagactctgttccttgaaggaaggaactatctactgttcccctagtaagacctggcctacaataggtgtctgtgatgctttttttttttttcatttttaaatgtccattttgtttattgatacataatatttgtgcatacttatggtacgtgtgatattttgatacatgtatagaatttgtaacaatcaagtttagaatatccatcacctcaaacatttatcatttctctgtgttgagaacatttcaagtcttctcctctagctattttgaaatatacaatatactgttgttaactacacagtagtcaccctactgggctaagggatggttaatgtgtctactcagctagatcacagtgcccagatatgtgatcaaacattattccagatgtttctgtgaggatgtttttggatgagactgctgttcacactggtagattttgagtgaagtagattactcttcctaatgtgggtgggcctcatccaatcaggtgaaggcctgagtagaacaaaggactgacctcccgcaagcaggagggaactctgccagcaggcagcctttgggatcaaactgcagattctggacttgccagcctccataactgcatgggccaattccttaaaacatacctttctatgtatgtatacttacatcctagtggttctgtttctctggagaaccctaatactgtgtccagtaaaaatctgttgtctgatgaaggaaagataattgcctgcctctttccatcccttcaacactcaccctgactctcagaacacacgctgtttggcctcatcctaatctccattccctcagtttctctgttacatccctgccatttatcccatttatgatatccctccttccttaggcaggataaacttgaagatactgttttcatcttcagcatactacctcctttgtctttcctctgctcgccttgtaaatcttcaacatctaatcaaatcatgtgccttctctaacctcactgttgttttctgctggagagaagccctgccaccagccagtacatattcataatggttgactgtatgtggctgggccctcagaccgctcagaacaccttttcatggtccttagtcagcccctactctctaccaccccaaatctttcttgctattcctctggtctcccatttctatcttcagactctcgatcttattgcctgacaaatgtttcaagcagaactcatcaccttccccacttcttgttcctcttgcttagtccctgttgtgataaattatgtccctcccctccccattcatctgcccaagctggaagaaaatttggcatcatccatgcctcttctttcatcttcaattccatcacccatccagttatttaacaagcgttagctgagtggctattatgttcctggcattattctagagcttgggatataagagtggacaaagtaaaacaaaaacactcctgccctcatggagcttatattctagcaggggagaaggatcatgaacataagaataattaaatttacagagtatattagaaagtgaataaacgagacagggaaaaatagagcatgaaaagggtgataagaatcgacgtgtgtgttggtggggaggtggagtgtgcagtgttaaacatggtggtcaggatatgcttcaatgagaagatggcactggagccaagacttgaggtgagggagggactcacacagatatctggggacaaatcactttgggtcaaggcaatagctggtatagagggcctgtcttaatccatttgggctgctataacaaaatgccattggctgggtagcttcaaaacaacaaaaatttatttctcacagttctggaggctgggaagtccaagatcaagatgctggcagattcggtatctggtgagggcatgcttcctaatagatggccgtcttctcactgtaacctcacgtgcaagtgttagaaaagttgggggagcctgagggtgtctctaggttgttgttgttcttgttaaggtactaagcccctcccaaaggccccacctcctaataccatcactttaggagttaggatttcaatatataaattctggggagacacaaacgttcatatctaaagcaaggccctaaagagggcctttttgagcgaagtaggccctaaagcaagagtgtccctggcatgttgctcgagcagtcacagcacttctgcgaatcttcagttacagcactcctgtgaatctccaactgtccatctcactgctactacctcaatctaggctctgggccttctcacctaaattaatatactgatttcctaagtggttttcttatatctggtcttgctgcatgcccacctacttcccacaccgagctagaatgacctttcaaaaacacagatgtcacctcatcagaattcttccatggctccccactgcccacaggctgacatgtgcacattgggagggcttagccctctcccacctggctccagcccactgctgcaatatcacaatatcacctcgcccatccttgacgcttatccagaggtctgtacataagattctctaaatgcaccaagttccctctggacccttcacctttgggacactgcttcctcctcataaaacacctatctcttttgctacccattgcaaccctcctcgtgctagaaagcatggcctggtcagctcagtctcatttccctttccctatacaacattgcttcctgcagaaagttcctcctgcccttcctctctctggcttaggtaccctccactatgcttccacaagagtgtggctatctctactgcagcaatttcatactgtatcttcacagtctctttattttttgggctcccctagtaggttttgaatatgggcaaggatcatgctttttaaatatcccagcacttggagccttacttgatacataaggagatactacataagttttggtcaaatgaataaacaaatacacaaataagccccatgtggaaaggtgaggattatatagatgcataaatagggaaaaactatatgcagaaactgtacatagcttcctctaaaaaggaatttcttatggaagcagaatctgtaaccatgaggcagccacccagaggagtagagtaatgatttgtgctgctccagtgactatgggttaggatgagtttccaggtcaactggattactctgatccctctttagagccattgcaagaaatcacatctcaaggaaagactcttctggcacctaatctcttttgtactttagtccagacagtgcgaggccatcttcaaataaaacaatctctttggcttcacagacaagaaaaatgtaatctatttcctacacgtgacaacaagagaaaatctaaaatggcacaaaaatgtaatggtaatatcctacagagaggaaagagctgaatcaaaatgaaatatgaccaaatgcaatcagcagctaacagcaggaaaaaggcagctgtcatcttcatttctttcataaacttcttagaacaaattatgtcttttagaatgtaagtcagtttgtcgggcgcagtggctcacgcctgtagtcccagcactttgggaggctgaggcgggcagatcacgagatcaggagatcaagaccatcctggcttcatcctggtgaaaccccgtctctactaaaaatacagaaaattagtggggtgtggtggcgggcacctgtagtcccagctacttgggaggctgaggcaggagaatggtgtggacccgggaggaggagcttgcagtgagccgagatcgcaccactacgctccagcctggcaacagagcaagactccatctcaaaaaaaaaaaaaaagaatataagtcagttttctttctggatactacttcgtaaagcttctgccgtttatgggaggtaaagcattctctgcatcacccaacttcgaagctggcctgcatttgcttagacatttcattcatgaaagcctgccctctcttagcagaggagcgatctaaacaccacagtcccaaacacctccatctgactgtctcctctgtttgtctatcaaaccactgattaaaacacattctgcattgattgattaataaacaggtttcagcagctctggacactcagagtctagaaggagaaaagtctagactcaaatagataaaaacccgtaattcaaggcagaacacaccctgggcccgagggggctggaggagaggtgccaagtgtgggctgcgcatggaacgggaacactggtgttaggtgtgggctgcttggaacgtcccaggagtagcttgcctcatgttgcagactaggaatccagctgtctggaggtggaagaatccatggatggtgcatattgcagagacacggtttcaaaatcttttgcaggatgcacatgttagaaaagagatcttaaaaaataaaaaatcctctaatggctttaaatgagcatgaagcattcagatgttaatgtttagctgtgtagacaaggtgtttcccaagttatctcaaaggttgatgacatgacgaattgccccctttaaagaaaataccaaatacacgaacaacaaacttccccgaatgtgttgactatcttttggaatgaagagaaaatctgggtcgagttgaaatcaccaaaagtcaatccacaaagtggaatgacattgctaacacacttagcatgagacctgaccccatctgattattgctcagcaaatgggggctgtcctgattgattactatttgtccagtctctcaccagctgagctctttcctctgttcctaaaataaagggtagggtgggggactttgtgccagataactaatctttactcagtaccttttctgtttcaggcattctgttagcagcttgatgtactgttctcatctatctcctcaagagtcctttgagagatatattttataactgttttgtagaaaaaaaccacgaaggatctggagatgttaggtgtatccaagggcacaagatgattgggaaggagtgaagatatggatgccagagcctgaaaacactccatgtgtcccatggtagcttgttctttggccaagtagcccttgcacacccccgccttgtcttgagacatgtcaccaaagacactcaaaccataagctccatgaggaaggaattttttattttcaccattaattataccccagttccttccacagtgcttgatgcatgcttggtattcaatacatatttattaagaagtgaatagacccaaggcctgggatgaagtttctgtctccaccaccactttccacccattcaagagtgagctgctcccctacgaggactgggcacgagtcaaaacactcctgggaaggatgaagtcttttggggagttcaagaactcctgagtccggacaagacttgtgccaacctgggtgacaaaggaactgtgagaccctggatggagttacaacccgaagatatgcctgaggcctgtcattcagcacttaattcctttttctggtgaaaattaaagtaactaaaatcctggaaccctagaggcttccagaattgtaacaactgtcttcagtagccatcaatctaattacatttttgcaatattctcattttgagctacaaaggtacaaattacacaaaattgtgtgtggaatgcatacatatgtatgtgtgtgtatgtgtgtatatatatgtatatatataaacgttaacatttagatgttaatgtttagccatgtagacaaggtatttcccaaattatctcaaaggttaatgacataattgtcccctttaaaaaaatactgaaaacatgaaaaacaaacttccctgaatgtgagcctcactttgttctgtacaatggagataataaaaccttctgtttcacatgaagagtacatgatggaatatggcaaaatgtcctgaaaaccagaaagtagtcttgtcaatagccaagatctgcctgactttttcacttggggtgcagtagttaagagggaatgtgctggagcccagctctggcatggccactagcaggtttgggagagcctgtgcttcagttgctttacctgtaacagggagatggaaatgtacccagctcctggaattgtttgaaagattcaatgtgaattcaatgatataacacatctaaagcacttagaagagcccagcacatgaacaatgcttaaacaaatgtttgctgtgattattactgtgctttcgggatcactgtgcaaatgacgattctggtcagctatgcattcccagagcagtggaagggttcactagcagctatcttcagtaatacactgcagtgaggggtagtcagatccaggcccacaatccaataaaggtggttggtcccagaagttattttgccagataggcagaaatcaaattgaagagaagagctttggggagcatgtgttctttacttccttttcctccctccctcacccttttcttttctttgctatttaaataaaccaccactttcaggcctgcctgggagaagatattagggcagcagggagtccagctgggagatgatgaggaaagcagctgagcccctgctattccacctcatccactccatcctccccaattaactggtaacgaggtggtgacgccctaaccacatttcacttcctgctaacaaagcttgtacaacaaatgcaaacacttggctgtcagcttctgtccagcacacagcctcgttatccatctcacccttctgcatctatgtcagcatccaggaggcaggcccaggacgacaaaccttctttgtgctacactcaatgccgtaccaggctctgatggtgcttacaaaatgcctttgcccgacagtaacaagaaaggtcccttatagatgattttgtaagaggagacatattctgtgcaggcttgtgtcattcctctgattattcagactgggagtaggggcagggaaggtgccaccatttcatttcttcctttctcatctgataaaaatttcttcccacctctttgaattgaggtcaggtctttttcccttttctaaatttgcctcaaagaagtctttttcatttttccttaagaatgactttaatggtctacattttaacctcttcctcatgtaatgtaagtgatctgcaaactttcttatatcttattccttttgaatttcaaattcctttttttctaaatcaatcccattatggcaagacattattactttctgctcacataaatactatcatccataattttctctcttccctcataaagcatgatttatgttgatatttaaaagtaaattctgatatttagtctaagtactgtcttacatattaattcaataacataatttctacgatagaaaagtacataagagtacaaaatatgaaataagcttgatatagacatagttatctgcatttgaccagtgaggaaacaaaagctcagaaaaattagataccttgcacaaatcacaaagaaatcagtggttcagctgaaaattagaaccaacatcttctgatgattacacaacttttctggttgactaccaaagaagatactagaaaaattactaatgagtgaaaataaaaagacatttcaaagtctttcatatttaacacaaaattatttttccatagaagatattcaagaagcagttacacatttgaggagctgtttttttttaattaaaaaaaccatattctttatctacatctagataatgtagattgatgatccatctaaatcaagaatttatcttctacagtgggaacaaattactggaatttaagcaacgtgaaatctcatcactttagcaatgacaatgaatgtgatgtagctttcaatgcagtactgaaaaagcttgtacactgtcacatgtcccaggcccttaggaacaaagtttagtatgcaatgagtgacgagctctataatattttcattcgaaacagagctacacaggaaatctaggatgtttataataatatttggaatatttggtataaatgtaaaacattgtaatagttttctgggcagataagagctcatcatatatccttttagttaagtcaagtgactctggagtccagttataccattagttcaaacactaccaaagactaaatacaagctcttacaggctgaattgcatctccccaaattcatatgttgaagccctaattcccaatacctatgaatgagactgtagttgaagacagggctttaaaagagctaattaatggctgggcatggtagctcacgcttgtaagcccagcactttgggaggccgaggagggcagattgcttgaggtcaggagtttgagaccagcctgggcaatacagtgaaaccctgtctctactaaaaatacaaaaattagctgggcatggtggcgtgtgcctgtaatctcagctactcgggacgctaaggcaggagaatcacttgagtccacgagttggaggttgcagtgagctgagattgtgccgctgcactccagtctgggtaacagagctagaacctatctcaaaaaaataaaaaagagagctaattaagttaacatgggggcattagggtaagccctaatcccataaaactggtgtcctattgagattaaaacacagacattacagagggttgaccttgtgagggtaaagtgaaaagggggccatcgccaagctaaggagagaggtctcagaagagacaaccgtgctgataccttgatcagctgacaccttgctgataccttgatcagggttctggaggcaggacttccagcctccagaactgtgagacaataaattacttctgttttagtcactgtggtactttgttatggaagccctagcaaaactaatgcacttaacaaacttaacacctactttcttcctccagcctctgtgcctgtgtttcatgccaacttttagtttctccttgatctgccagtaatacaaagatgagaaggtctggaaggaggatttaggataagctgagaggatccatcttgtaagactatactttcctatgaaatgctgtttcctccttgttgcctggaaaactcatcctcaatcttctagacctacagttgggttattcttcttcagaaccttaatctcttcaaggtggtgcctctgctacaccctataaacccacctctggcacagcacatatcacaccatgttagaattgcttccattggcaactccttcctgatcttgtgaatgatttgtgctgctccagtcactattaggatgagtttccaggtcaacctcctgttttgaaaggagggacttacctttgtggtcatgtatttgacacctaagacttactcgttaagtgtttgttgaatgaatgaatgaaataaaatgatctccattcctattcaaataagcctgtaaataacagtttaagcatggtcatatttgtttgttgagaaagagaagtattaagtgatataaggtttaaaaaagcaataaaatctgcaaaaagaaaagtgtctattgatgaatttattaacaggaaagaaagtaatcgaggataagaagatggaaaaggtggaagaagagaccttgacaacctgaaaaggttatacccttgtgcagatgtggtggacaaatcctcacctgagaggaggaatcaaaggggcaactgctctgaaaccggccctagagcatccaacctaaaaacaatgccttcatcatgaagttccagaaccaatgattcaaaggataccccactgaaaaaagacagtcgtcgtcctagaggtaaaaatcactttacttgccaataaacagaaacatgagcaaatgggaaataagcaaaaatgaaatgatgtgtgtgctctcttccaaagggcagcaaaagcagctgagttaatgctaatggctcacatatggtgggtggggggaaaggatgttataagtcacaaaaccctggaatggagcagaggcctgtcggcaagttaggtggtgatgatggagtcaggatgacttggaaacactgtgaaaagatggcttcagataatgggccattatctgtctgcctcttttcactttgactactgtcctctataaataatgtagctggctaatctaaaacatacagaatcaataggaagccaaatatttaggtaccacaaaatgaggcaaaaaaagagcccagattttcaaacaatgcaagtgaccctgaaaattgtaacttggcaagtctgcaatattgtgagagcaataacaatctgttaacatctagagggaataaacccaaaagaaataagaagccgagctttatgaagggaaaaaaaaaatggcacgccaaatttgattgcttttctgatggaattacaggattactagtttaagggagtggagcagatgtgatatatttgaattttattagggcatttgggagaacgtctcacacaatttccttcacaaaactaagtgactttagcttgaacatgaactgaggagataataaatgaagggtaataatacgttacagtcaatctcatcgggaggaaggtgtttaagaggtgacactaaggctcctgttgtttggggtggatagaacattgattttaatgatctgtaaaaaaggaagaataagagtgacagagaggaaacatggagatttattggacaaaaagactaggaacctggttaaaaatacctgaatatagggaaaatgcaagctaacaaatatatctgtatgtttagaaaagtaaatatatttggaaaaatatttgcagaaatgcacacatgaaaggagaaaaatgagaaattaataacactgaaaagtacacaggagaagctccttgtaataaacttgaactgcaatacagatataaaataagagatcttaataacttatactgtcataacaatgacacacatagcttgccccaaagtaaattttaggttcaaaaagctaattttactcctctttgaattgtatcattataaattttaaccttcaagtttagcaataaaatgacttaaacagtttaaacaaaagtgtaacttcctataatgacagcagcatccatcgaaatactgtaccatctgtggactagaaactacccttcttcatcctagactttgccctcttattcatctccactgaatcacaaatcttagacaattctgcctccttgcctctctttgggacctatccttgctccttgttccatagatgctaatttggttccagccctcattctttcttaccagcattattaccagagcccagtattgcagtatcacatctgctctctgtgctgtcagaacaatctttctggaaagctgaccatgtaaattctccctgtttaaaaacctccagtggctccccatgccctataagacaggcctaggcatagtgttcaagcccttgaggatctggtcccttctgatctctttagctccttctctttccaactctctcctccctttccacactctggcctgaagcccttccagttctcggcagctctgttgtctgtttgcctgtctacccctccttgcttcctccttcaggatgccatgcagatgccatattttgaaggaagccttcctggtttctttctttccactcttgtttctttagtttgtttatcatgcaattttttctactctatctataaatggtgggaggcaggggctgttttaatcctctatgttgctagcctgggacacacagtaggcccgtatgtacatgctgaataaatggacccaaaccaccaatataatcagggactgtgtctactggtaaggcaggcctgggtttgtgataaaaagtgcattggttttgtgggcagcatagtggaggcagaaataacctctaaaaggactacagtgatgacacaactgacacactgctgtaacaagccagggggtaactggggtgtgcacctgttggccggtggctcttgaattcagtcttcctcattcatctggcctacaaaataccatagtttagatcagaccctgcaggaaccataacaaaaactgaaggacaggctggtctttaagtacaacttagcagagcatgacaaatgcagattgaaccaaagtgacccttcccacctacaaatatagtcatactacacctctgcttaaagtcccttcaatggcttcccattgctaggaggctgatgtctaacagcctcatgtctctcctcttcctcacactcactcatattacattaccactggttgccacaggcaccacatgtgggatgctcccatgccttcatccgtgctgtttcctgtaactgctggaagtgccctttaccctcaaccctttctcaggtttcctggtgaattcctgatcatccttgaagtcatctcaagtatgaccttctctgagaagtctcccacaacctttctaggtagagctgagcatgcctactcagtgtcgccaatgcaccttgtaatctatcaattaatgtaattgaacagattacaaagtgcattggtgtctgttacatgcttgctcctgtcccacgttatgggccttacacgtctttgtattctgggattctagcaccatacctggcccagatcaaggactcaaattatgtgttgaattgaatttgttgaattcacatgaaagacaatacttatccaaagcctgaatggctaaagtggttatctttgggtttcttttgacaataggaagcatcatcagaatggactaaaatgatcaagaatgtgcagaaggacctccataatcagtaactatagagataccaaactttttagttacataaattgaagacaagagcaattacagaagattatatttaatggccttcaggtacaggtagaaatcacatgatattttagactgctttctttaaaaatgcatcaaagcactgtgaaaagccaaaaacatccttttggaagcagcattttataccaggtatttaaatctattttcactgtgagtttattcagagtaattgtataataaagaaaagcacttggcttcaggtcactatgcatatatagctaaattatgcaattagatgacatgtaattaaccagagtagcaacacagccaatctaatggggccagttggggtctgagtgactcataaaaacattatgtagttaagcgataggcacctacaagaacaatgaattttggtctacctgcagcctaatgagtccctcctgtgactaaagaggtaatgcaaagagaggtctcagagacagggcagtgtcaatggaaattctgtctaagaaggagccaaggtatcatcttgattcttattttccaaaacttctaatgagataagaaatctctccaaacgtactgctgccaacattaccagcttgactcttccattaccacaaataataaacaaaaaacattagttaaagcttattttgaatgaacttgaagaaatacttcctgacccattactcaggtagtatatacaacagattgactattcagtaagtgaaaactaacggcggaagaaatccaaattagctttcttccttttccttcaaggatgtatacatggcaagcatgcatgaattaacacagttatgaacaagaaatattatctcttgtgtaaagatcaaggtttactgtctcattgtgtttggttttgggaacgtagttttgattttgtttgcttaagagatggaagaattccagttctgaaagaattcaagctatgaacaggaaagtatacttcaataattgtcccagtgacccttatttttattaagaagaatctagcaactgtcatacttgctaatgtggcaataattcttctaatcttaaatttttaagtaaggaaaaaatgaatatgtagccatttaatcacaaactcatcctctatttcccaacaccacttattccatatatatatttactgaatataaatatactaggcctcagtggaaacacgaaggatgtgcaagactcagtacctgcctttaaatagcttacaatctactagaggaatgaaatctgtcgcccactcttttattttcttcttcgaaatggtttgagtatatacagtatactctaaaggtttaattaaaatggaatatataaaaatctgaaaggatacatactaaaatgtaatctgaaagaggggtagcaaattattctttttgctctctacattttctaattttttttttccctaatgaggacgtactacttgtgtaaaaaggagaagaaagttattttatgaaagatgaaaaaaaaaaaaacacctcactctggttagcctgatattttgtccttttgaacacttaaaaggccccattaccaggcagaggttgcaatgagctgagatggttccactgcactccagcctgggtgacagaatgagaccctgtctcaaaacaaacaaacaaacaaacaaacaaacaaaatgccccattgcctaaactctgaaaaagtcaatacggggttgttgacaaaatctattattactgcccatctggtgatctgctgctcccctaccagtgaggaagcttcttgaggtcggggactctgtcttgtttgctattttgtttgttcaattcctaacagggatcagaggacaccatagataggtaataaacgtgtggggaagatgggaggacaggagagcaggaagagagcagggaaagctgaaggtacacacacttctgaggcttttgttaaaattaagtatttaatgcgatcactttggggaaaccacattgattaaactgacgggaggcatgaaaatgacataattgatacaaccgataattttattcttcaacaaaatctactattggccagagtgcccctttgagagataatggttcatatcagggagcaatttgctttcaccccttgcatacaaagcgggtttcaaaacctatgtagtttcggaacaaaagaaaaactgtaatgtcttaatttttaagcttttttcaatgcagagactctaacaaagcagatctaatgaacagggcatcatattgcatactgtctgtgtgattggcgccttctggagttgtgcagaagacaacctgtgaggccatatttagccactctgggcttgcttcaggctttaagttcttgttgttaaacttaatttttcagatccatgtggtttggaagcattgtgcttatgcctaactttggtgatgtattgacctttgtggaccaaggatgaaagctggcatgaaataagtacaggaaacttcataaaataacagccagcattaattgagcacctacaaactgtcagagggctatccatctatgtgtctatctaatatttagtcttcagaataactgtgcaaggtagatatcatcaccattttacagatgagcaaaataagtcttagaaaggtttagtttagtaattttcccaaaagcacacacagctaataagtcatagagtgaggatgtaattttaggtctgatcagcaacctcaatatgtcattcatcctcgcctttcctctgaagaaaagcagcagcttgtcttatgtattttaataacactggcatgttataaaaagttaacctttttgttttgcagttcctcatttttctttatgtatttctcttgcttcttgttttttttcccctctcctccaatatcaattcctattcctcttacgtttttgtggcatttgagaaaccttcgttgaaaattctttgacagtgtctgcaagtcttctgagacaaagtgccacaaagataatgtttaaataaaataccacatagtacagataattatatttaggctttcagtcaccctgaatattggacaaataaattctcttggaatcttcatattgatgtacataggacacacacacatgcacacatatgattagaataattttttccaaccagaaatgacatttgcttttgaaatgattaaatattaccctcaccatcagccaagatttccatgacacttgaataaacaaaaaaggagttgattactgagattctttgtttttcctcttcctttgcacagtaggaaaagtaatgattaaaaaaagtataaaacacatattaatgatacaaaacagaactatctccaatgctttgaagaatgtattcttcatatccactagggtgctaaccttcggaaagctacaaaatcaatcctgaaagttttatctcccatggcgacagagcccttttttaagtcagtaaatactaaaagtgatacaataacagctcatatttaggattaccaagtttctctacaggagacaggctcaggtatcaagaggaaaacaaatattcattaaaataatttagcaacaacaaaagacacgtgatgatgaaagtctgttcaaataacaagtgactaaaataagagtgctgataaaaaggaaggtagcactgatatggaactgggttttggtaacaatatgccaatcaggaataaaaatataaatcaaacttaactggaatgcataagtatacccagctttacaagatgggtaggtttctggccgggcacggtggctcatgcctgtaatcccagcactttgggaggccgaggcgggtggatcacaaggtcaggagatcgagaccatcctggctaacatggtgaaaccccatctctactaaaaatacaaaaaaagttagctgggcgtggtggcgggcgcctgtagtcccagctactcaggagactgaggcaggagaatggcgtgaacccggaaggcggagcttgcagtgagccgagatcgcgccactgcactccagcctgggcgacacagcgagactccgtctcaaaaaaataaaaataaataaaaataaaaaataaaacaacaacaacaacaacaacaagatgggtaggttcctaaaaagctttgtataaatacagttgctccccaacccccataattactggaaggagagagagaaagaccctaatgaaatcttgcagtaaattctaaattacaaaccgaaaaaaaattttgaatggcaaacagacactgctttaattccctgcttggaaagttttttttaaaaaaaattttttaatgaatgatgatttgaatagcagtatattttttaaaaattaggcaaacacgtatatcactgcaaataatatggaaaatagtatggaaagtggagaaaacccccaaagagctaatttccattttatatttggtatttaaatgccacattgataactgaacactgtagtataaataaattattgttaaactgtcttataaattgctcagtccttcagtccatagtcaataaaatataggccttgcctgtggtttactcaagactatagaaattcagagtaatcaatcattccaggtggcttttatagctttccaggtagcaagagctatattttattgaatgaggcatttaattagtgggtattattaaagtgcaattttccatattaaactgttttctatataaattggcttcctggtatgctgacttgtaatgacaggattatcttgcattcactcttgtagagacaggtaataactcatctttgtgcctgttttttgattccacagaatgttattctttctgctgtcatcaaaaaatagtttctgaacaaatattatccaagatttttcttatgctattgtcctataaactcaatattttaagactaacctgaatgctaatattatatattgtgatatttcttatgttataaaggaaattgtaccataatttctaattgtagactaatcgcagccattctaccacaaaaatgccatattcaacactttttcctattacagtataaaacaccatttgaccttttattttaaaaagactgtgacaaataaatactaatttaatgcataaagtctaataatgatctagatttaccagtgtaagtgacaggaggtaaattaatatggaataagtatatacttcacatgtttcttggcatatatgaagaagcactgaagcaaatgaatctatctcatgtaaggcaaatattatggaaaaactccagaatcagtagaaagagatatttttgccttttcttactatggaaattcactgttataatacttaaagctgcagatcttttctttaataataacttctgtttaaaaatctgtaacaagagataccattgctgattacataacattggtgacatactactgtgattttttcagttctgtaccaaaagacaagaaaaaaacaaaaaacaaacaaaacgataaattctgccaatgtttttaaacaagaatgtcttctacaccaagtgctactttcagatacagggctacagtgcttgaacaatcaccgtattagaaacaataagtgatacaaagagtaaaaacaattttcaaaaaaatcaaacttttataacatttacatagacaccaaagaggacaaaatatccatttccagaagatgtgcagtataattagtcagaaaggtatcgcaatgcttttgattatgatcagccagttgcaaagattatcaaataaacaatctagctattgctgctttgctagaaaaatgatcatcttagtggcaaagattaataactgctttttaaaaagacaaaaactagctttgtgatttactgtgtactttctcaagaatgcacagtaagtaaatcaacagtttgtttaatcactatcaatgtggcatgctttaatatattggatataaataattgtcactaaaaaatcatctgctgcatgttcagataaagctgtagagatctctgccttgttacctagcaactgggcaagtaactgccatactgcaaaaaaaaaaaaaaattccttattatttaggtaaagagaatgatcataaaactccacattaagatgttaatgaagccaaaatgtatattaagatacaacagctaacgattttagatgcatttatggccttggttttgaaataccatgcagtaatgaaaactgtaaagatttaaatctattatttcagcttgtcacaaacaacaacgttctttagagtgtatttttaaaagaccactgttattattaattttttatttgtactctttcacagacaaaggaatttcaaccagatcttctgtactgagtctatttattgaaagggtgatgcttacttgtttaaatacaataaaactgttctgagtaattagttcactgcaagggatcccaaattatttcttatatttcatataacagcttaatgtattaattttataacatctggaggaatctggcttaagttctgtttcaattttgctaaaaatctggattccaagattgtgcataaaatctctcttaaaaagcaataggggattagggcaattataaaatttcacttctgaggtccaaaattcagcatatggccagtcttcaggcctcaatctgaaagtaattctttctggtgtgtgatgaaggctgactggtcagagcccatatgacgatggtcacatgagagtaaggaaaccactcatcattgcaacaaacagagactgttttgtgaacagacagagctgtgcttgatgaaggcttcacaggaatccaaaccccatagcttacatggcattcctctgttgatttaatgtacgatgcttttattcatagtcacttacaatgcagggacacaattcaagaaagctcttcaaattattgcatggaattaagtttcttgataaaactttacaatttaagataaattatgctgaaaagttaaagggaaggttggctttacaaattaggagccgaaagcccagagagattgagtagttggaagttgtgcaacgatataacttcttataaaagtaaatatatataaagtgcatagaacagtgcttgccacaccagaaggattatatgtgtttgatattgttattttttattagtgtaattattattagaagtattggatctagaatctgttttttcgtttccagaacaatgttcttttcactaagcacattacctcaaaataaagcactgttttaagatgcaccatgtacatcttctatgagccaaagctgtattttaatgataaaggtgtgtattaaatgaagatgtatacgtagattcacattaaaagcagaaaaaattgagtcttcataactagtaatttatagttatttgtttaaaatcaaatctgtatcaccttcaaatatatatcatttacaggctaatagctaaacgcaagtcaaaatggtatcccaaaggaaacactttactagtgttagtgtatagaccaagatgtataaactttcccatctttaaatattttctctgagttacattttcactaattcatatcaaccattaacctgttatttttatttttataacattaactttacatacatataacctgatacgtttgtactgaaagatttcagacatttgttggattaagaaaagtttactctgagcctaaagagttcatacatatgtacttcttgatcttgattagtatatattcatcatatgcttctctgtatttacattctctctccctagctggtctcatctaggcacgtggctttagaaactatctatttgggggccgggcgcggtggctcacgcctgtaatcccagcactttgggaggccgaggcgggtggatcatgaggtcaggagatcgagaccatcctggctaacaaggtgaaaccccgtctctactaaaaatacaaaaaattagccgggcgcggtggcgggcgcctgtagtcccagctactcgggaggctgaggcaggagaatggcgtgaacccgggaagcggagcttgcagtgagctgagattgcgccactgcagtccgcagtccgacctgggcgacagagcgagactccgtctcaaaaaaaaaaaaaaaaaaaagaaactatctatttggggagtctctcagatgtgtatctagcatcctgatctttcccctgagttccagactagtagacccaatgatctgcttgacaattccatgtggatgtcaagtttctcaaacttaaaataccacaaaaaaactcttgcttccttctttcactagtagcctaatctgttcatcatccactcagttgcacaggccccaaatttagaagtcattcataactcctccctttttctcatctttcacattaattcattagcaagatctctaggttccatctctaaaatatacattccagaatctgatttaagatggaaaatttaaactgcttcacagaacttcccttcctcaatatctaaccaaaggagaaaaaaagagtaaacattagtaaaatgaaaaaaagaagttccaacagtaaccactcaaggaaaggaacattaacaactataataaacttcaaaactggcagccaaggaaagagaagattctggaacaggctaaagagacacagtgttccttggttcttaaccctgtgttcaaccctagagaggtaaacaaaattctgagactttttgctaataattctaaatttagagaaaaacacattcagtgaacatccttatgtttccttttactactaaggagtaataggaacatgtgcaatgaaagaagaagatcaaagggctgattcaacagaagtgaacactccagggctgcccactattttggggaaacccatcaagccccagattatctcgaggatagctactagctcttatggaaccctttagttaattataaaaaggctatccttggtatctctccctccaccaccccccttgcccgccccgtcaatttggtgaaataaaggctgataatggagacatttaacacaagttaaggaagcacggcccaggaaatctaacaaagattgcatacagcttgagttgagctgagctgtctacctccctctgcaatttctttaggttgcagaaaagtggatagatccaagcaataaaacatagctcaaagaggaagcaaactggtctccaagaaggtgggaagaaatttaagaagttactcacactatgtctggggaaagctgcccaggcaccagcaagatgaaaagaaatagcacggcagatatgcaagcattctaagggagggaggcaggaggagggaaaagagaggaaggaaagagggagggagggagagagagagagcaacaaagtgaagaaaaaatataaaatgaaagtatcacagcatataggaactaaatctagaattttattcaaataaacagaaagaaatcctcacacaaacttcctactgtagaataacgagttcaatgaaaattgaagtttaaagacagaataatgaagaaatctgaatgagatgaaaaaggatattgtggacctaaggaagcaaattaaggactaaagatcataattttagaatcaataaacaaatcagaacatcagaagcagagtagacacttctgatagttgaattactgacacagaagaaaggacccaggtaccatgaatggagacacttctgatagttgaattactgacacagaagaaaggactcatgtaccatgaatggagatgaaaatgacaacagattttcatcaaatgataaactaatagatatggaagagatgaaagatgatccaaaataaggataagtgatgttcctgaagtaggtaacaatgtaagtagaataaaaggtgttttcaaagatatgatacagtatctgatctaaataacacatcatattgtggaaaattcttaagcagaccatccaacacctccacatatcttagctatgttattaagctatgtggataaagaaagaattccttgggataaaggcagaaaaaaaatcacctacaaagggtggcctcagactatacagagatattcaatgctattaaacaatgaagtaatagctgcaaaattataatggaaagaatacatgacataagaatacaacgttcggccatgatatattgttcgactacaaaagcaataggaagacgttctccaaaaaacaaaacaaaataaaacaaaacaaaaaactcacaaatgcagaatccatgggtctttctcgaaaaaaagaaacaaaaagcagttggcaatgaaatctaggcaattcagtgatgaatcaaagaactcagtcagaatgaagaagatatactaaagggctgggaggcaatggatccatttgaacataggaatttatactaaataaccatagtaattatgattacagaatagaaagtaaatattataaacacaggcaatataaattagttaaaattgttagctgaggagaggatgggcaaaagcattacctttcaaagcaaggaaccaatctgatgtgtttaaaactggaatatgcagcttaaaaatgtgattccaactctgaggtggatttactgttaacgctaaggaagcttaagttccaaggttttttatctacacaggtgatttgcgttttcccatgccctggaaggggtcacagcagtgcattcatattgtcatatttttgtaaaatttgtaaaaatactccattttcttaaagagggcccccaaattatataaccttcccacagaaatcttgatccactcctgatcaaacctcttaacatttttcatcgtattttttcttaaccataagggaaaataataactcccataataaggagacacttattggaagttcaacaattatttagtttttctttattttttttctgctgttaaatacaataaaaccattttttttttgagacagtctcactctgtctcccaggctggagtgtagtggtgcgatcttggctcactgcaacctctgtctcctgggttcatgagattctcatgcctcagcctcctgagtagttgggattacaggtgtgtgccaccacactcagctaatttttaaaaaatatttttagtagagacaggatttggccgtgttggccagactggtcttgaacttctggcctcaagctctccaccggcctcagcctcccaaagtgctaggattacgggcatgatccaccaataaaataaattttaataatttttatttaaaaatagcatcagcattatgactccacagttataaagtctttctttctatccgcacagtcatgtatcaatccctttgcacatatttatagaaagatgccttaaatgatataagtctactgctaaaggtggttatttctgggcagtggtatttggggtaattaaaaaatttaatctttgtattacatgcattgtctgaattatttattgtgatcatataacaaatatttcaaaaataatacaatgacttttttccttcaaatgccaagatagtaacagatattattttggatggtgagaactatagggaactgttattttgtactttgtattttcctgtgtttttaaaatttcaaaaatgttttccaaaatttgatattctgaatcattccacatctctccctttttcttcttccagccaagtcactattatttctcacctggactactctcatagtcttctgtgtggtcccacctgtgtccatcctagccctggtattacccagtctttacacagcagccagggtgtgctcctcaaatgtaaaaggatcacacctctgctttacattccccagctgcttcatattgtctttagaataaaacccaaactctttgccacgaccagcaaggctgacctgagctgaccgggattcagtcacgctggactgctctctgtcccccacacactgcacttgttccccctgacagatattccatgagctgttcccctagcctggggtgttctttctccagcatctccgtatagctggttccttctattcaggtctctgttggagggccaccttctcagggatacccccaaattttctaatttctccctccatctccctctccagtgcttcaccctgctggatggccttcatggcctttatcaccatctgaaatgatcttctccatttatttatttacttcctttgtatcaatcctctcccactaaatatctgctctagaaaactaggaccttgtctatcttgttcatcattatatctcctgctcaaagaatgtgcccagaagatagcagacacttaataaatatttctccactcaatggatacacacagagattgtttctcagcttaaaaaggcttgtgtttgcaaagctgtcttttaagtcagttgtttagaattcagaatgcatgttctttaaaatgagtcacagtacaaattcaatatcaagcctagctcacaaagtctactggacccataatgagttaaacttctgtatatctgcaacaaaaatgctagaaaatcaacatgatgaattatcactgggaaaataggaaattaaaaagaaacatttcaactgatctaaatatgaacaaactatgactattatttctctctcatattggtgaagacttttgtgaatattctgaagggaacgtcagaaccttttttattttttttttttttgagacagtgtttcactcctgttgcccaggctggagtacaatggcactatctcggctcactgcaacctccacctcccgggctcaagcgattctcctgcctcagcctcctgagtagctgagattacaggcacccgccaccacatccggttaatctttgtattttttgtacagactggtttcaccatgttgccaagactggtttcaaactccggggctcaagtgatccacctgcctcagcatctaaagtgctgggattataggcgtgagccaccacacttggcttcagggcatttttaagagctgcagaagtttctggttttttattgtgtataacttcatccaaaaatgtgtagcttttggctcctttgataacagaccattaaattagaataatgtttgtaactatgagttttattatctgtttttggttttagttaaagcttgggaatgacttgcacgtagttgtaactgcaacaggtggtatgttttgtgaatgcttacctgtcattacttgagtcactgtttgtgtcaaaaatgtaaaagaggaacgagtttctgggaggtattaggaagagaggggctcagaaggaaaggaattaaagaggacgtgtgattggaaagatatctgagataagagcagcgaacgagaggaaagaagaaattagtgatgaatgatcagaagaagacagggaagacgacttcctcctgctagctactaggaaatgttatcttccaagacagcttggttcctgtctagagtagctctgggtgggtaaatggagggagggccagtttgtaaataacgctgaaatttaagagactatatattatctaatttgaggctttgtcccaaatttggtttggagtgagtttttatgactaatctaccagtagggtgaaataaatagcatcattcatatcaggagtaccaaccaaccccataagagatattgaagagacaatgccaaccttccattctggagtaaagctatagtgcaagaaaacaatttgaaccaattattttcatactaagttgacagttaagacagaaaaaaatatatatattaagagccaagagatactgcatatggtctgcaagtcttttctggagaaatgaatcatgaagataaagagaactggcttatttttacagttacattttatatttctagaaaaataactacaacatggtcttgatgtctaaacatagggaaatgagacttttatgaacgttacacaacacaaaacataccacttgttgcagttacaactacgtgcaagtcattctcaagccttaactaaaaccaaaaacagataataaaacatatagttacaaacattattctaattgaactatactttgaaaatgactgaatgctcaaatattcttaaaatacaatgttctcttgccaagaaaagagtgttggtcttaaaatggccacaaaacctagccccgtcccatgttactagagctacagaatcaagcaccctccaaatatatggccaagcagccttggaggcacctaatgagtccaacgcagtcttcccatgtgtctcagaggctgctgtctgtagtgacagaggtgatagaatatggtaaagttgcgtatctaggaaaatctcaatgtagtccctgatttcccagagaatgttcttgtggcttatcctctgaggttagtagtttcagtttagtacattaattccaaacactaaagagatgaatccattcaagtcatttacagaaaaattgttttgagatttacccaaaaaacaaacacactataaagaatttagtaacagagaagattagaacttgcacttttgcttctgctggttcaagttttgttctgatattctctgcatttcctatttccatatgagaaaaccaccagtacatctttgctgtgtgaataccaacactgagaaatattggccaaacataaagatttttagagaattaatttttgatattcatctaaacaagccaatatattctcacaattttttaaagaaaaaaaaaagaactcagcttaatcatatatttgacttctaaaaaatcatctcatgattccatgaagatagagaaaaaatcagatgaacaggaatggttttcatttcacactggaattataagaaaggttaatttttgcataaaaattacatctacataaaaataatttctggaacaatgcattattgacagttatgtgggaagataaatgcattcacgtaaatgttctttctcaagcaaattactaaatatattgacagcactgcactttgaaaacaaccattttaaggcaaccaaatacatatacaagagtaaaaacattacatataatagccaatgtaatgtttcactcaatgcatattcactcaaatatgcatactttttttcagtttattgatatatactgctattaaattaaatagcaaacacttatgctttgttgttggctattgcccacagaaggaaaaaaatgggtagtcaactggagcctattcacacttctgttaattactggtggtccatggaagatgttatagtttgattactagcacttgtaaatattaaccaagtctaagttactgctataaaatccaaaatgtgtaaaaaccaaacacacctatacaaatacaaatgttttactcatgatcgttaatgactttaatcaagcagatcttctaattaattttgctaattgttcattcctctcaggacatttattggtttgatggatattactatgacatatgttgatgccagcatctggtcagaaatgagggcatcaataaactctccttggtgtttctacagaatgtgccaatgctataaacactgtcaatgccacagcatttatttcaatataagattttgagaacatgtctgcctttcatttagagaaaggataaacctacttcgaaacacacggtgctcaaatatgcttattcaatgaatggtgcaatgagaatggcttgataacaaactggaaaacatctgccaacatttaaaatagaataataacatcataaacgattattaggaatggcttcccccacaatgtactctgtcaatttataccctatttcgaatatgtagactaactttaaacaaatatagtaccgctatcttaaaggaagtgatcccctaaacatttctgaccaaaggtaatcatatgcagtaaattaatagacaagaaatgcatcagaattcgattcatgtatagaaatttggctaaacttgcaaacttttatgttgttagtaactattcagagattatcactttaaactgctgacaaataagtgcacttatgcagttttatttttaaaaactagttatcccaaaatatcatattaaataatacaccatgctgtatctatatttcaaaattattttaatggagatttgatctccaggtagaggcaaaacactgttttctccttctggcccccattagggaaactgtaacagtatggttgtctcccgtttctacacatgaatctattgtcactctactgtcatggcttaagaaaaaaatattgcttctactcaaggtgccaaactgcaccaagcaaagtaactccaatgcagtaacattaagtttggcaactgcaggacaaggtttccatccttgaacaaggagcactgatacttcactattttgccccccaacatcatatttccccctgcattctgaaggtttttttaaaaaatatttgtaacaatgtttttgtatgacactggcatcaagtctcccaggcagcatgcatctgttttaatttcatttgtattcgttactcctttcttctctatctgagtccaagagaatcactgctaacacacccagcactactcaggatagacaacgacagaatgaaacacttctgaggaagcctttccggtggcataatgccagcactactcattatagcctattttatcacagagccgtcaacattacggactcgaataacccagataccagcggcatccccttgcacgagctcatctgcggagtacaaggaatacagatttggaagaaacctctgagaggttttctaatctttcctctcttccttctgacttctaactttaacgtgagcccaccccaaagaagagaactagactctcttagtaacttgtgcaaaccttcagaaaagtcttaggttgtacctaaattcctcatgttgccattccaacactatttcctgtagttttccctttccagatgcaggagtccacagagcaagtatccttataagtgtctaagaatcatcaagcaattccaaagttcccgtgtctctaatctactgatccaacgtgcccggcgcacataagcagcaccgcgactgaatttcaagtcttctcaaactcacacctcagttgctcagagaggagaaatgcagcgaggactcgccttcctggccagtctctgaaaacgcgaaaccttcctgagctgtccatttgttttaggggctgtttataaacggctggttttcttggaggaaaaataaacaaataaatacggggcgatggcagcatcctgataaacacaggaccttgtttggcttttggcaagttgtaacctggagtaaaatcacatccaagttacaagcacgcaaattggaatttcgctggaaacactgacccgaccttcaccgaagcagcaaatcgcagtctctgctgctctgctcctgctctccaaggcttaacattggaaagtccatgcccacgtccccctctaattaatcaatgtagaaagaaatacgagggaagagagagggagcacactccacaccaaccttgccagcttctattcttcctgctattccttaaaggcgatgcacagcgcacctggaaattacgtggacttggcatggctttttaatattaaagacaaacgacctttggaaaatatacactgttaaagtcaaaccatttggagagacacccagcaatttacctcctcaaactcctcggaaccccaagaatgaggaaaggaaatggaaaatgcgcttaacccgggggtggtgggggaatcgataaccagaacaggtttgaaaaaaaaagcccccctcccgccccctccgtagagaccgctagctgaggctgcaacacctgccccggcaaagcgtctccgcagccttcccggcttgcccgactcggcttcctccgcctctgccccggctgcggcaccacttcttggagccacgtctcggcgagcgggggccgcggagcgagggggccgctgtgccgctactcacccgagccgctcgggctggccgcgagccgggatccgcgagggctggcgggctctggcccccgaggacgcagacatgtggcttgaacctccgctcccctagccgttgcctctgtgcatctttctgggcgcccccagcgaatgcgagcggcgaggcgagggcgagcgcgccgaggaagggcgggagaggcgcggagcttggccgcgccgcgctgcgccgagcgccgggctctccccgcgagctccccgggcccgcgcgcgcgccccccactgcccccgccccccgcgcggcgcgtgccccccaccccccgccgcgcgccctcgcacccgcccggctccacgcggcgcgcgcctgccctggcggcagcggcggcggcggcggcgcgtcctcccccgaacgccgtctccagggctgctggctgcgctctccattgttccgcggctgctgcccggggtgggcggcgaggcgggggggaggtgtcggcttggccgccggggagggcttaccgctcgggcggaccctcactgcgagagcgatgcgggcccaggcgcggcgcgcgggggctgcagggcgcctagcactgggggttgccggcgcgcgggggcctcctcctggctcccaggcactcgctgctgctgggcgcccctcgcatcctcggttactatggatatctcgctcctccgccgccccctccgcgcactccgggaggccgccggggcggtagcagcggcgcggctccgcgggtgcccaggtgaccggctcggcagcggcagagcagtggcagcagccgccactgccgctgttactgcggtcgccgccgctggagagaggaggacgaggagggcaaggggcagaagcaggtcctgctctgtctgccccagaggccacctcgggtttcttctcactaaccaagcgacttcgtgtttacctcgcaggagacgcctcggcagtcctcaacttgtgtgcgccggtggccctctcctgtgggacttgcgttccagctgttctcagagcgggtatgatcggcctccagtagacttggagggtcacgggtgagattttgataaggttcaaatactcctcactcctgcctccggtttccaccaaagttaccattgtactactaccaacagttgtggaaatttactttggcaaaggttttgtgtttttgtttgtttgtttttccccccaaaaattatgccaattaaatccgaccttaaatgacaaggcttttctctcatgtttaaaatcccatttttttccccttgccataaataaataaaaataacttgtggcttacaggctgcttaataccacaacattttaatgagcatgtcaggtaacccacaggcttcagttctttgttgcttacaagttccatccgtaagtgtgagttgctcacttagtctggggtaacaaccgcagattcccacagagaagaatcagtgtcttaaaacaaggtaataccaacccaatggtctatgaataggttggaatggcggtactttaagtaaaagtataaagaaatggttaacattatgaggaacttccagcagtactaataatcaaccctgttgttcaggagacattcacttgctaaactttaaggctaggcatttactgccttgaaagcaaagcaaatgaagattttgaccaactgcaacattcaggctctaaaatagaaatatgaatgaattattaaataataggtaacatttactgagcacttacgattttccaggcatctgtgcattatctcatttaattcttacaactctatgaaggtttcattatattatcctcactttacagattaaaaaaaaggcttagatctgcaactggtagttttggaagaacattcttttccttaaacaggaaactctaaatgccctctgttttgtccacctttgtgccactgtctgcttctgtgagggtcaggataatagtatacctgaaaccgcccttttagcaagcggcagggccaggacataagctcagactagatgtctaattcacttgctatacatgtaacatgtaaaataaaaaagacctgcatcttgactggtgtactctttgataaatgggacctgattacttgatggaggcatgtttgactatctttgtttatgacattagcaaactttcaatgggtttggaagtgaggctatttagttctgtgtcttactctgcaatccagacacctgtgacttgaggtaaagtaagtgttttcttggtttcccaatcatgagagtgaccgaagaatgacattttccaggtcatcattctcttgtggatattgttctctgataacaatattgggcaatctcaaagagctgtcatttcttggcagtgaactacaggctatttggaaaggaggtgtaaatcactttttcatcatgtccagtcctctgcactctagagtcatttgggatgttttgtgtctgcactacctctagagaatgatggaaatctaattctctgtcagcttttctacctggctagtgaaaatgcttcttgggagagctgggaggggaagtcgctgtccatggtggtcgttactgaagccccattcagcaaaatcggttcatactctaaatactggaatcctgcttaattaaactaaggagcttctgcacagcaaaataataaacagagtaaacagacaaccttcagaatgggagaaaatatttgctagctatgcatctgaaaaaggactaatatccataatcgataaggaactccaatcaacaagaaaaaaaaaagcattaaaaaccgggcaaaggacatgagcagacatttctcaaacgaagacatacaagtggccaacaaacacatgaaaaatgctcaccattgctaatcatcagagaaatggaaattaacagcacaatgagatagtctcacaccagtcagaatgactattattaaaaagtcaaaaaataacagatgttggtgaggttgccgagaaaagggaatgcttatacacaattggtgggaatgtaaattagcacaacccctgtggaaaatagtatagggatttctcaaagagctataaacagaactaccattcgacccagcaatcccaatactgggtatctactcaaaggaaaataaattgttatatcaagaagacacctgcacttgtatgtttattgcagcactattcacagtagaaaagatatggaatcaacctgtgtctatcagtgaatgcttgggtaaagaaaatgtaaatatacaccatgggatactatgcagccataaaaaagaatgaaatcatgtcttttgcagcaacacggatggagcttgaagccattatcctaagtgaaataaaaccagaaaatcagtaccacatgttctcatttacaagtgggaactaaacaataggtacaaatggacatacagagggaaacagtagacactgggaactccaaaagcagggaggatgggaggggactgaaactgaaaaattacctattaggtataatgtccactctttgggggatgagtacactagaaacccaacctcaccgttatacaacatatccatgtaacaaacctgcatctataaaaataaaaataaaaaataaacagctgttaattttgcaaaataagtaaatattacagtctggaaattaacttcatcatggcactaatgaaatttggtgatattctccagtactgtatattaaaacataaagatcttatcagtataatctactggttggagtaaaaacattaaataattcacaggagaatgactttttactctatggcactaaaatagcccctattcattgtcaaattttagatatttttaggtaccagaacagcataaaggggataaatcatttcctgaaaccctctcaccttacagcaaagaaaatagctacctatagaggttaaccaccataattagaagcaggcgtaaaaccatgaattcttgccacagaatcacttatcatgattctgtgatgcaccaggatattgaatgtcagaatcattctttcttcagtaatttcatttttttgcttaaaaacaatttccaatttatgtcatttgaaaaacagataatatatagtctgatgtaatatgtagctcatgttcatttatgtggagtgtatctaaatcttataatattctagctgtattaagtaatattgtttcctgcaaagtgagacagtagaaaaaactcttatggtaccaatttctgaccactgtaacccagtgaaaagcaaagcattaatttcattacaggtcatcaagaatgcaaccgtcaacataaactgcttatttaagagcagccattttctatcagaaaggactaatattaaaattccccactttcctatattctccctttgtattaaaaaattatccaggggaccatgttgaatattccagtctcaaaaatccaaagatggtggtaatttttctaagagatatgtaaggccctttgtaagatttagaggaataggattttaagagtttattcatttgtttagtagtagtataatgcaatagttaatctcctgactttggaataagacctgtggattcaagtcatgggtatttaacttaattgttttgtgatcttgagtaagttacttttttgagccatgctgttctaatttgtgatatgaatgtgataataatgtaagctacttcacaagagttgtggttggaaataaattagattaccaatatgtagtacttttcactaagtaccacactacttttcactaagtaccacacattggtaatatcatttggccaggttaaagtttccatttactcaatcaaagactaatctaggtgtttctgtgaaggtattttgtagatgcaattaaagtctatagtcagttgactttaactaaaggagattatcttagataatgtcattcaactagttgaaagtccttaagagcggcttccctgaagaagaaattccacctgtggacggcagtttcggctcatccacaagagttttcacctgcccttcctaatggcttgccttagctcagtcttgtccagccagtctccacaatcatgtaagccaattccttgcaataaatctttttgtatatgtctcctactggttctgcttctctgactgaaccccaactaacacaccatgtaaagcattaactatagtatctgtgacataataaacactccaaaatattagttaattttttaaattaacccttattgaacatctctcacatttatagcactgaggtatacactctgataaaaatgtctgagagctctgaaatagaatagggatagatagatacttattgtctccaatgatagtaacctcaaccaggaagggatttaatgttttagtaaaatttccaggaaaacaagggaaaagtgccaatgggttgattattccatctggagctatgtaggggaattatgcaaattcagtatgaggccagtttcctgggttaggaagacaatgaacaaaaaggcagttactgttttctcaacagatccatatagatgtagcacctgaaactagacacaccagtttccatggatcaaccatggaattccattctgtaagaaaaatttatttacgacttggtcttaagccaattggaattatatacttgataactgccttgagattcttggaggaagaaatacgctcatatttaagagtattaaagtaaaagatctttcttatttcaatgttagcttatcttagtattctacattgttagatctttgaatttgttttgtgcatttttaagcaaggaaaaaatacttatatcactaaaaagcaggcatagcacaaacctacttaaatagaatctgcctccgtccttcagaattataatgccaaacttacaaaacttaaggctggaaatatctcagatgagtaaacaaacctcagggaggtagtctcagatataaataggattaaaaggtgatgagaaagtaagagagagtgagagcatgccttttggttttatattaaagctctgataatttagagtgaatcttagaaatagaaatgttttaaattgtgtgtttgcaggtgtgtatgtgtgtattcactaaagacagctgtcccatgatcctttatgccataatagtaattttctcaaaggcagtgctattgctgtaaaaatacttttactcattatgcaaagatttattgaatacctgtgatgtcatatgtcgagctggttgctaagggataggaaagtaaattagagatggactctaatcttgtggaactctctctgggcaactctaatttatccttatggatttcaactaacacgtgactttctctaggaaatttttgtacttcccttgctctgcactggcctaggcagttctcttttgctctcacagtaactttgcttccactaatattgcatttatcattttttttagtaattagtcaattgcttataaatctccctataagactgcatgaggtcaaggaccttgtttatgtgaacctctatttttgctcggctcttgtcctcaaataggcattaggtaaatatttacagaacgagtgaaagaaagcttgggacatgttgaattttaattgctttccaaatagaaatatgcaggaagcagaaaatatataaacctggagctgaggacagagatgggtgcaagggatacaaatttgtattagctgattcctggtagttggaaggcctgggtggattatcttcaatgaggctcacatgtagaattatgaacgagaaagtctgaggtcaggactctggacagcgtccacactctccattttatctgtgggatgaaacatggcccacatggctaggatggaaatgttttgggaaacccaaagcccaaataaatcttttcaaccatgtgagtaagtttctaatagatatttcagaactaagttactgtagagacaggagcactataaatatggatttataatcatgacattgtggaactttacctcccaatatgtagagagcagggttttcaatttcgcaaaataaataaatgaataaatgttagcatatgttaatagagggcacaaaatagaagtcagagagagaaagagtgtctgtggggactcaacagactctgtgggaatcagactctctgattttctctctcaatggaatcaaggagtcccacgagttaggcattgggaaaggctctctgggtggtgaacagacatgtgtggctattggtggtgaatgtccaccacagaagcagcgtggctcttccttatactcaaggcttttttttgccattaatgagaagtaagacacagactgactcccagcacttaccaattttattattcttattgcctcctcatactttgccatgggaaaatccctgtttggatcacaaatttaaaacaatagactgcctgttaaccatgggcatatttacagatctgactatgagctaatacaacccagagtgagcagaagggacttatactttttcctgaaggcaagcaggcttggaatccaaggggaatgaatataaacactgagacccatctgccccagtcttctgaattaaaacctagggacttcttttgttaactctgttcaaggcccaaaccacatacagctccattgagccacagctaagatttttgcttgcagcctttgcttagaactggcccctgagagtcagtttcatctgtacagcacagttggtaagtacctcatccttcccacacctttaagcaacagaacagccacagtcaacacttacagcaactttcaaggttagcaatgaaagaagaaggctgcagtaacctcatctggatgcctgttttactaagtaattatacatcccaaatttcacaggacaaccttctttaaatgaatcagatcataaaatctgatttttcacttaggaaaatatggttaaatcatattagagactcatacttggagtcttcaaggaggtagcataatatacagaaaaaaagtccatggactccgaccgtggttcaagttcagctctatcatatttactggttgtagaccctgagcaacttgcttaacctgactgcacctcagtttctgcatctgtaaaatgaggataagtgttctttaaagatgttgtttaaggattaaatataagtacactcatataaaaatctagcacaatgcctggaccacaataattattcaaccagagaatcaagttcaccctagtacaaattcataagcattcagaatcaagaagttattccagcttatcaacagaactaaataataaagctcattcccacagcaccttctagtgtgcttatcagctgtgtaagtgaggaggagcccatgaacttgggaggggacagtaactttttatattgtagactcataaaaatgattttatttttttctctacaggatttttagaggacaaaatagtctctcatttgatggtgattatgtacattattatgataattctctaggaatgcacattaaggattttgaaatatattagaaggacaaaggaagaaagaatgacataataaatattaaaacataatttggggttgggataattgaatcttaggataaaatatggctgatggccattgttttttcctgctcaacacccggtgctctatttctgttaccaatagtctgatttgttactggggacccaactctcccacacttagctatgaaatcctagataatcaaccttaaaagagctggccatggagtggacccatgagccactggccaagcagaagattccatcatgcagccacagtggtttgttcagagacggtcagaaccaagactgttggaactactgggaaaaaggggaactcttctcactggggcttctgatgatgagcttggtattaccagggtgccaggtgtaatgcctggagctgccaagggccatcttgtggagagggtctacccaagagtgaagccagcgcagagaaaagcagagcagagatatggattggagtccagtgatagtttttgaggctctggatccagtcatgcctgaaacctttggactttatctcttatatgagccaataaatttttcattttacttcagccacttggagttggatttttggcagttgtaactgtaaagtgtcctgatttcttcagcagggaacttaagtataatttatctcaacctcccctctgatgtttgaatcttctctacaacttctaatgaaagagtcactcaatcaaggcttggactcctccagtgatagggagctcattaccaactgaagaagcccatccatctttgagacttatattactgcaaaattttttcttatatcaagtgaaggtttctgaaacctttgtaattaccacttattttgtacccagtagaggccagagaccctgtgctatgttatacttaaaaatatacattgtgatttaattctcaaattaaaaatttgaaaattttatttttgaaataatttaataaattaaattaataaaaattaatatctaatgatattaaaattattttagaagctgctgcacaaatccaagtgagaaatgatgagaggctgaagcaagggctatgggggtggggataaagaagatgaggagggatccagtgatgtacagatgtagcatacaggtgactgagtggagggtgagggcaagagtgaaacaggagacttggagggcctccagaaaatagacaggtgttgaaaagcagggagaaacaacctggatgggaaagatgaaggttctgctgtttatcccaagagttaccataagtcgaaggggtcactacttccaaggacacatgatagctctacaaatttctttaaaattttaactgaatctggtttagtgttaagaaataatcatgaacagaattggatgtgcatcaaaagcaaagttttagaaagacctgcaatttttgcacagacctttaatcacatgagtgcaagtcagaataacacttttatgttcagcccttaagactggtttctcccttctctcctcctgccagtgccccagaaggcagaggagaggatccagagaactcagcacgaagatgcagcagagtttgcctgagccacaggggatgggagtctgaccgtgaggtccaggaaccaaagagaagtgcattccagtggaatatgtttctaggaatgggaaagagggagaaagggaagaaacattttatgtatacctactatgtgccaggtcctttttatgtaggattattattattatttcagtatcactttttttttttcccaaatgtaaaaactgtggaggtctgcaaagttaagtaattttccaagatcaagcagcattagaattaagtccaggatgtatgtatgcctctgagatctgtaatttcttcattatgctatgctgtctccttaaataattagcagttataagacgcaagttataaggtgacaaaatacattgacatggtatctggattaacaacaacccagaaggctagtatttctaatattgtttctattttatagatgaggaaactgagtccctaagaggttcattgactagctcaaggccacacagctagtaagtagaaccatagctggaactaaaaattcccatctccaagatctgtgtattttcccatgacactgcagctactacgctgggcaagctactatgaagctggactttgtcagaacagtgacagataacagctttgctctgaaacgttctttccttcaaaggaacgcacccaacctaatgcttgtggtggcgcctgctttcacccacattggctcacaagagaaagactccaaggaaaaaaggaatgagggtccctagagtttctgatgagggtagggcggaggtgctttcaaggatggttaaccctctctcagggctgggcgcaaaggctcctgcctgtgatcccagcactttgcggggccgaggtgggaggactgcttgagttcaggagtttgagaccatcctggacaacatagcgagaccccatatctacaaaaaatttttaaaaattagcctggcatggtggtgcacacctgtagtcccagctgtccgggagggtgaggcaagaggatcacttgcgcccaggaagttgaggctgtagtgagccaagatcgtaccattgcactccagcctgggtgacaaagcaagaacctgtctcaaaaaaagagaagaaaaagaaaaaagacatgagacgtaggagccaggcatttttcagccacaaataccaagtggataaaaaaaaataatgaaaagaatagaagaatggttagcccactctctttctagtgaaccctgggataaggtctatggtgcagtgctgtgaaaattcactcaatccacgagatctatacactttgttgggacctgggatagaatgaaccagtgttcccttagaatggaaatgactgagtagaaataatgtgggaagccacattaactctttcaggccattaggctatcatttagtaaattactacattgttctaaatgggtccctagtgggtatggagggtgagaatgttctaatttgcttttctctcctttctctcagctgctttctcctactatgatgtagaacaagaagtggtttaataactgctctattccaaatcactgaatgctcttataactactgcataaaagtgcccctgcaggtctgctatattgaaatgtgtggaatcaaatctatgcatatgatatgaggggtgggggctgcaatctggtacccacaggatctagaagtaactcgaggaaccaggatatccctgattttaaattctaggttaatggagggcgtgtgaccgagagccccatgttcctggggagggaacagatgccactggaagctgcagggcaggagtttctccacctaaaagggaggatccacaactctgatctgaggaggagtccgtgtctctgccttggcatgtatattacaagagaaaatcataggaagggcaaggatgttccctgacgactggcttccctctgtcactcaggatgcatggccactgttggttgaaggaactatcatttttctccctgattgaaaaacaaaagaatcaaagctctcccttgtgcttacaaatctggggatattaattaaatacctagtagagatgctggggcctaatattattgcataatggtgattacagcaacaatgcattatatagcattaaatgtttttgaagcactttcatattcatttgttttttaaataatttttgtttttatttttttccagtttcattgaggtagaattaacaagcaaaacatgtacacctgtatgtattcaaggtgtatgatatgttgttttgacatacatacacactgtgaaatgatttccacaatcaagctaatgaacatatcatcccctcacatagttactctgtgtgtgtgtgtgtgtgtgtgtgtgtgtgtgtgtgtgtgtgtatgtatggtgagaatacttaagatctgctctcttagtgaatttcaagtatacaatacattattattaactatagttaccatgctatattattaggtctcctgaacttattcataactgcaagtttgtaccctttgtccaacatctcccctttgcatattcgttgttggtcagggctatcttgatggacatatgaagatgggctccatgcttggtttaattctctgcagtcacagtcttgtaattccaaataactttaacttggaattagtattttgtaagcaaggtctgatgggactgtggagcatgtgctgggcttggaacctcagcttgatgccgtcctgccttcctgggatgggtttttggctgccagctccctgtctcatgctggtcctgctcagggccctgcccactccacccccttaccccacaaccactgctgcaatcaggtggcactggcagggggaggaaagagaccagcttggattcagtccttgaccactctcttcccccaatggtggtggtgggggagtctcgacatggacggtcatccacctcatggctttttggggtaggcaaggcagcagccatccttgtccctaattgcaacatcatggcttgtttggtgggtgatatagtttggctatgtccccacccaaatctcatcttgaattgtagctcccataattcccacgtgctgtgggagggacccagtgggagataattgaaccaaactgtttaccccatactgttcttatgctagtgaatcagtctcacaagatctgatgattttataaggggtttccacttttgcttggctctcattctttctcttgcctgctgccatgtaagatgtgcctttgcttctcctttgccttctgccaggattgtgaggcctccccagccacatggaactgtgagtccattaaacctctttttctttataaattacccggtctcaggtatgtctttattagcagtgtgagaacagactgatacagggggcaatacagttggtgactctgcatgagtctttcacccatctctgactcaagtaccaagcacatcctggcctagggattgtaatctgttgggtagtcacctgtctgctgtgggttgggagtggtgggcctgtaggaaagggagattgacttccctgtccctggccaggcctcacagtttcattttataccaggccttgcaaaatatatagccagacctgtagttgacatttattgtaatatccatgcaagctggataggacaagaatgttgctactgttatgtctgcttccattatttctactgctggggaggctaccattaccttctctgtgacttgcacttgggcaagcacttaacaatatatcatcccatttaatcttcacaaccaatatacaaggtagggtttatacactggggtggttccctaacttctctgagttttagtttcctcatctggaaaactggtatcataatgcctacttggtaaggatattgtgagaattaaataagatgacatgtatattaagagatggaggtaattttatctacctgcattcctctaattctatatttgttaggaagaaatcttttggtaagctgcttgaggagaagagtcaccatggacagactaaaataacccaataagcttgcttaacttttgcacttatgacaaggagtagtgtttgttccttgccattgttcccaagaggaaggtggcaaagaaagagttggtgagggcgaagcatttgcaggggaagagaacaggagtgacagtatgtcctttagaaagtggaaatattgaatggggttctaaacaaattgtttggttgggtttatgctataaacagcccaacctacccaccgtcatgaaatcttcagtaaaggctgtgtagctgactaacgcttttgtgtgtgattagataaatgcgggagaggggctcagtgtctgttctcaaagaggcattgaaattcacatccacgttggcacaagtgaaaacagacagcttgtgccagaagatgagtgcagagctggtgtgtggttctaatactattcttggaatgcttcctctgagtgacctccctctctgttcaggccacgcatttctggagggtataacagcagtatattgttatattgtatatatatgtatattctgtttggtttctattcttccacaggccccaccatcaggttccgcacagagtgaacactcaaatgttgagggctgataaatgtgagtagcaactactaaatgaaggagatgaatatgcttttgtatagtaacttcaacgatgctttgatatagaaattagtttacctagtgtactgatgaggtacatgaggctcagagaggctaagaaacttgcctggcgtcacacagctagtaagcagcaaaaacagacattcatgttccatacacaatgccttcctggtcagtgacactttagcagactatctagagttctggcatcgtataaaccaggcattatccacatatgtatattttaaaacctcactgaaagcagaaggataagatgaattgactttaagcattcctggggaacaaaaagtcaaaatggaaaaggagaacaggagcataagaaaaaaatatatagcataactcgttatcccttagataactgtagggtcatgctgatattagtcattgtactgtgatgacaccaaaaagggaaagtgtaccagctagccaggtagatgcaattcattgtgcaagaaaaggctgcctcaaatgtgtctaaaagcgtggttcttcattcagccaagtcaagaccaaaggagcacatgaataattggctacagctcccctttcagcaagtaccagctttctctgctgaggctgatacagctccatacctcagggggccgggaatcagctgccagcagccaatgggcttctgagcattcataagcagaccaggtgctgatccatcaggctaattagcagcctgtgggccacagttagctgggaaggtggagggttttaactcttttcctgacagactccaagcctatctgggctttttgagcaatgttctatcagtcaaaccacaaagaaaagtattagaattcaaaaggagggaagctaaaaggaaatatagttttgctttaaataagacaagggagactaacaacacaaaggaagtgaactttgactctcaaatatacatatatatagatgtatatatgtgtctgtacgcatctcagtctacgtatcttcatgttactgactgtaatgtcatcaccacagcagacattcaatacatgtttgcttttgttgaggatgatatagtgatatttaaaacagaaataataaacaagggaagaaaataggacaggattgcaagggagggggatatttagcttgttggcacctgaaatgtatttaattatcaggctcccaaaagagcagaggaaacagaattagcttcaatgaaaaatacagagaacatgctgaaagttcagaaaaaatgcaaaacttactttaattaggagatggagatggaatacatcagaaatagtgtcactgcaaattaccagacttataaaccaatatgtaaatcagcagaggaaacaatcccatgaattttagtaaatttgtagaaacttgttgtaaatagtgcatttaaaattagttttaatgtgaaatagaatcaacaatcaatgaagccaacaccatccaaatgtcttcattgacataaaaggagcattctatagtcaattggttctatatttttgactttagtgtggttttgttgatcatggatccaataatctccagtgaagcagtgccaatatatgatctagcgataggaaataacaaacaagcatcctaatccttaaagtagccaaatctgacaatcatagaaaatggcaaggcaggatactggcaaaagtcttaaaacacagaggtaacatttatggagatgtctgcacgggctctctgtcaacatatggagaattgaggaagagctacgggatttcaatgacaagcccatcaccaccatctggagataaaaattctgtggtagattttttttttaaactgtgatattttactgataaattttatattagtgacaagatcctaaccaaagtttccttggactgcttactataaaactgtgtactattgactctggggttaaaaaaatggatttatgcctcactgagaaacagctgtcattgcatttgtagaatcatagtgtcaagatgatgaaactgagctaattccagagtcttcagggacctaaagaaagcattatacagccctgaggaggtttgggtgtactggcagtaatgtcaactgtatggccctgagaaactaatctccatgttgagattatgaacacaaatctttccccaaatatttactgagtaaaaacatagtgagtggtccattagggagagcaggagcatgagttggattgtttttgttctaagaaatgaatgcactaccttggactataatcaatttggggattgtggtcttttaaacagaccatagcagatgattcagtgtcagtgggccactggattcatgccaagtgataattctccataacgcttcctacagtctggtgtgtgcaaaacaggcaaggtcacaagtctgttctacagccaccgggtgtgctggtccttttattgtcctggcaaagtaacaaccctgtgtatgcacccctacaaactatctccccatggtttggtcagagctgacccccaagctcaccctgcctaagtcatttattactagcagaggaagaaataagcatataatcatgaccttatctacttctctagcctcaaatctagtctctcctcaatcaaaccctttcctatccctcagggacaccttgactgggtgcctttgcctgtgggactctctgcccttagcatctttcaattagttctctgcctggaaggctgttcttctttcatgtgttacctcctcctgaaatggtttcttgataataacagcaaacacataggatttgcttcataccaggcgcacttctaaatgctttattaaatgtacttacttctcaccagaaccctttgaaataggtactgttatagtctctactttagatataaagaaacttaaaggcagagttgttaagaaatttactcagggtcactggtaaatggtagagctgaggttatgaaccatggcagcctggctccagagtgtctgttcttcatcacgactctgagcataatgatccctagactttgctgttagtatcctgagcactcgctaccagagaagtagctgcactgcactctagtcatgtttgtaagcttcctctctttccatgctaactccagttaatccaacaacactcagccaaagcatcaactttttcccccttaagtcttcctgatcctgctcccctaacctgtgggaggtgaatcctccactgcccacaccatgcttctctctgctagactccttatcacaccacgtgtcttgtttacctgtctgcctccctcattaatctgtgaactctgaagttttgaaggcacgaatggtctcagtaacacagtatctggcatatagaactgttgcttaataaatatttgtctgtttgatggatggagactggtgctaacaagtcttcattttgcaactctggtttctagcttttaccggcagattaagaacaaaagggattccatcacaaatcctgggagaatcatgacaaatgcttagcttcagttcagaaagaagcaagactatttatagctcagggactcaacattaaatgacccggacttaatttttccttgtgacctagatttgcacaactttagatggaaagtgcccttggagatcattttacccaggtattgcaaactggtggcctagagttgtttttatttgacatatattatttgtttctatttttattagaatacctttagacaggacatgtgctttttatttctccacattttacatcatatcctatcatacaccactttactcatttgtattatccacctgaccattcaaagcatttgaatatgaaatgtctgaattagtctaactcattttttttggtctttgtttacagtaaagctcccaagtctgtacttagggtctccaattttctcattaattcattccagtcagatgttctcccaccctctactgatgtgtagactgatttccatgtaacaatgtaccaatcatgtaccagtgatttccacctagctaaatccagttcctagcttggacctcaacccctcctccttgacattcaggaccatactctcctggttttcctcctacttctctggcctccccttctctgtcttcttgctgattcctcctcatactctcgacctctaaatgttggatcctccaaggtgcagctcgtggcctgcttctcttctggatctactctcatccccttggggatcttgtacaggctcatgagtttaaacactgcccacatgttgacacttcctcagtgtacatctccagctcacttggttgtctagtgggcctgtcaaacttaatatgtctaaaaacaaactgccaatttcttcatattttttttgttgttgttgagatggagtcttgctctgttgcccaggctggagtgcagtggtgcaatctcagctcactacaacttccacctcctgggttaaagtgattctcctgcctcagcctcccgagtagctacgatgacagacgcgtgccactaccacacccatctaatttttgtatttttagtagagacaaggttttgccatgttggccaggctggtcttgaactcttgacctcaggtgatttgcccgccttggcctcccacaaactgtcaatttctaccccaaacctgctcttcttagcagttttctttatgtcagttaggggtatatccgggccaccagttgctcaggccaaaatccatgggcttatctctcattgcttcctttctatgtgatatggtttggatatttttcctcttcaaatatcacgctgaattgtaatccccggtgttggaggtggaatctggtgggaggtgtttggatcatggcggcggatcccttatagacggcttagctctatcctcttggtgatgagtgagccatgagatctggttgattaaaagtatggtacctccccactctctcttgatcctattactatgtgacatgctggctccttgtcaccttttcagccatgattgtaagcttcctgaggcctcaggagaagcacatgccagcaccattcttcctataaagcctgctgaaccatgagccagacaaacctcttttctttataaattacccagcctcaggcatttctttatagcaacacaagaacagtctaacacactttcatatgccatatacaagtcctcagcagtcatgtctactccaatcttccagtgcctcccttgttctttaagagtaaaagccaaagaaagtccttagagtggtctctaggagccttgatattctaccttccttccttattcctatccctacctttatttctcagacccccattcccaccactatcccccttattgacctgcctccagctcactggcctcccttcactgttgagtgaacactccaggcatttttctacatcggggtgtttgcatttgctgttccttctgcctggaatacccccacccttcccttccccatccccaggtatctgcatgtatctgcatgggttgcttcctcatttccttcatgactactcaaatgaacctcctcactgaagctttccttgaccactctatttgaaatagacttccctaagccaggatgatttttcatccctcctttctgcttttctctagagcactttattaccctctaatatcctatatattttacttacctattttgtttctcttcctactagaatgtaagctaaatgagggcaggcttgtttgtcttctttgtttactgctacatcctcagcatcagaataaggctgagaacttgttatgggttgaattatgttccccccaccacccccagtaagtcccagtgaccttatttgggaacgaggtcattacagatgtaattagttaagatgaggtcacactggagcaggctggacccctaatccaatatgactagcgtccttctagaaagaatggcatgtgaagagaaggagatatccatagagggaagatgatgtgaagatgtacagggagaagatggccatctacaagccaaggagagagatctggagcagatctttcagacttgatttcagacttctaagacttctagcctccagaactgtgagacagaatttttttttagacagagtctcactctgttgcccaggcaggagtacagtggtgtgatctcagcttactgcaacctccgcctcccaggttcaagcgatcctcctgcctcagtgccctgagtagctgggactacaggcatgtatcatcacacccagctaattttttgcatatttagtagggacgggctttcaccatgctggccaggctgatctcgaactcctgatctcaagtgatccacctgccttggcctctcatagtgctgggattacaggcatgagccatcgtgcctggccaagacaatacatttctattgtttggaccaacctgggtgtgttactttatcactacagccctagcaaactaatactcaaaaaaattctcaagaaaaatgtatgggtgaataaacaagtgaattaatcctttcaatgaagaaactgaaggccagtgaagttgattaacttgccagaaacacaccatggtgaacgggcagaaccaagactcaaatccagctttcctgccgccccatctagctctcagccaccacatctggatgccacgtcagtctgtctcatgagcactaacaatggtgggctgaggttgagggggatctccggagccccttcaccatctcctaggtcttgcctatcctgccttcctgcttaacgctcccaccaccatcacataacctggatatgttgtggccagacaattattgacgtatgtttgttaagtgttctgatctcctctcagaggaaaaccctgtgtttgactcttctattattcaggaagtaataaaagttatagtcataatatataagaaaaaagaatgattcactgctgagctactgagctacagggagcaatccaaggtttagaacagacaattggctaagatcagtcacgatgatgtcacagcggaatatacaaatacctcagtgggctgatccaagagaacatcacaattaaatcagcttactgctgagcactcttccacatctgtgaagagctgctctccattctgacagccacgtttaaggaggtggtggaggcggcagtctatccaacaccctccacacaggaagaaaggattgcaaagtgctactgagtaaatgaacatcattcacatggaaatgcactggacgagatcatacatgttaagacagttaacagacaggttaggaacaatgttttcttttcagaatggaattacagtatgacattgggcatgggaaactgatgagagccatcagagatgatattcaaaatgtttaacaaaatatcgacagcataagccatcaatggccaatgcagccttatcaatgcagagtggttgaacatggtgctggtgaaactcacttggctagaatagcagagatgccattaacctctctgacccttagtttagtttcttcattgcagagtgaggcaccaccacttatttcctagtgttgttacaaaggttaagaaaaaaatctgtgccacaattcctggtacatatcagatccccaataataagagcaaacatttatgtgtctttattatatataaggtattagcaaatgctaatttacttaacccttatagcagccctagtattcaactattttttttttttttttgagacaggatctcactctgtcaccctggctggagtgcagtggcacaatcacagctcactgcagcctccacctcccgggctcaagtggtcctcctgtctcagcttcctaagtagctggtgctacagatgtataccaccatgcccagttaatttttaaatttttcgtagagacagggtctcactatgccacccaggctggtcaagaactcctgggctcaagcaattattattagcattttcccgttggagaaattgatatagagagcggttaagcaactttctcaatgtcacactgctggtgaatggcaagacagggtcttaggacccaggtagaatgaatcccaggggctccttccccaccctatgctaccctcaggaaatgtcggggcccatccctcccactttatgctccagagagccagtgtccctgcaaacctaacatctcattgcctcaaagtcccagctaaagcctagtggagaggacatcactctttggtccttcagtgccctagcccttctttctaggtttactcaatttccatttgcatgaagacagacaagaaaaacagtccaattaatacgaagcgtaagaccacaagatgagaaggcttttgctttgctttttattttgtatcagctgaagtgctgtgagtattcgggatgaaaaattatttatcccagttaatgaatctcatgataataaaaatgcctgacagctctgagattagtgagtagcccttatctggggaccacttagtgaagcaaatcctgcgtgaacaaaggacaaatgggatttgggagaatgaggaggaagggaggctaagaacgaacatgtgttttgcagctatctcatgccaggcatcacacaaggtactcaaccctcattctttcttttaattcttttgagaactcagtctttatacaaacacttatggcagtgccaggtaccataataagtgttggggttacaaaattaaataaatcatggcccctgtccttttaagtagaatggatacagaaaataagtagagaggctatttatgttcactgcaatattagtttgatatgagtatacacaggcagtggaactatgctatacaggccaagatgatacctaccatgtcaatagttcctgcataaggactatttcctgcatacgcagctgtgttctgggctgggtgatatacccctgcacctccccatggcccctcaggcccttcacggaggttagttggctagaggagtgagattctcttaggagtttacacttggaagcagaaagagaatcaggcaattggttgtgggaacagaaactgagaagatgatctaaaaggagtgatgaagtacagtagaatggggctgggtgggaccatgtgtaagcggaagctatgaatacacagaagatacaaggcacagaaaacgctgagcagaatgtgaggaagctaggtcgtagcaggaaatgaatagaagcagaggatactctaaccaacgtatgccccacaatttaatcctttccctaatgttagatcattctcattttttcctgtattacaaggaatcctatgatgaatatcattgcacatcagtatttgtagcatttctgatgagtttctctaatatattcttggattaaatggtatgcacattttaatgctcttgagacaagtatgcatctttatttccaggaagatagcactaatttcccacgcccttcagtattatatgagtgagtctactttaacacattgtctcacactgagtccttgtcacttaaacagggaacggtagtaactacctttttaattgtttaattatttaatttttaattgtttgcatatttttcatatgttatgggacatttgtatttcctcttttgtgactccagcttgtttatgtctttttgtccatttgcctataaggccatttataatgctcttattgatgtatgagaaatcaataaaatttatataacaagaccaatactcactgacatatttagcaaacacttacccataattagttgttttccttttcatttttatttgaggcacggaagttttatatttttcaatatattgatattttcctttgtaatttgtttcaaagggtttctttttgcggaaaaaaatctttttctgttttctagatcaggaaaatacttggctctgtttcttttcctacttttggaaaatgtttttgcttttatatttaacttttctgttcacttacaatttattttggtgtatttgaacctttatgaaggaagattttgtactaaattaaaaaagaggatggtgtgatcctgtttcagaaaaatctaatctgtgttaatgtttgttccccagcagaatcaaccatggattacttccaatgaccagtgcaatgacttgagcacacacagacccatttaaatacataatgagggagaacatatgatcaagggcggagatgccatcatttgtgctctgtatacaacctacttttattaaatggaaattatggtcactgaataactcaatctacctaaactcttacaaggaatcagaagccctcagttcttaagctgggtctgtactgatttacaatgggacacaaacacactgtacctccttaaccctaacacccactttccaattgcctgtctttcaaaactatctaattagatttctttaaaaagaacatttttgtcatttgtgaggaatttttcttttcttttttagtttgctcttactgaaaaaccaaggcaacttcaactttatcttttcatagggtccctttccaagtgttatgactgaatggaagctgtgtggttggtgaagtacttcggctatatttccaaaaatatgcaattgttaggggctgcaatgcaacagccagttccagagactagcaaaaggcagggggatactctcaagagtgactacactcgagactttccatttcagcaacttcaggaattggggaaaactcactaattcaacactgagttctctgaaagtgatggtgtattagtttgctaggtctaccataacaaagtacagcaaattgggtggcttaaacaacagacatttgttttctcagaactctggaggccagatattcaagatggcagcactggggagaaaatctagcttctggtggtttgcaggcaatctttgacatttctttgcttgcagaaacatgaccacaatatctgtcttactcttcacatggcattctctgtaaagccacactatttgcttagattgtttgaagaaggcactttcagatgtgttccagaggctgggcaccttgatctggatcaaacgctgccaattgttggttgaaggtgagtgtagaaatgtatctacttccaaagccaaaatattactgtattagtccgttttcatgctgctgataaagacatacctgagactgggtaatttatacaggaaaaagggtttaacggacttacagttccacgtggctgggaggcctcacaatcatggtggaaggaaaggaggagcaagtcacatcttatgtggatagcagcaggcaaagagagagcttgtgcaggaaaactccaccttataaagccatcagatcttgtgacatttattcactatcacgagaacagcacgggaaggacctgcacccatgattcagttacctcccacctggtccctcccacaacatgtgggaattcaagatgagatttgggtggggacacagccaaaccatatcaattactaagtacacagaaaaatttataagtcttggtccatgtacctcatcaacttcttctagcaagaagcagctggctgacttgcaatgaaatctccttagagttttatctttaaatcattgatctcaatggatatcttatacctgaaaatttgctgttttactaagggtgaagtaaattaaattccacaagagttagaaaataatttaatcagctggcaaaagctaaggatgaaagcaagttaatacaaatttcaattttcaaacaagattcaatacatgtatataatttatttggctagattcaatacatgtatataatttatttggctattacagggagagaaaacataattactaggtcttattaaaagtatgtctttcttcttttccctgtcatcctttcttccctttcttctttcatttttaaattcccttcccctcttcctcattccttcctcctttcttttcttcttccctcccttgatgttttccatttactcagaaaacatttagggagcaattaccacaagttagagtatacaccatatgccaaggatgcacccaaaatgtacaggtgataaagcagcagttcctgccctcagcaagttcatagcctaatagaatctgagttatgtaagggtgaaggccctacagtacattctctataatattgtagtaagaggaataatctcagatctcatgcatgcattccatgatttttctctttacttttgccactgtttttctacctgatattaatcttaatactataatcttatactactccttcaagcagctccgtgtgttttctataggcccaccaattattgccatgttctaataaggttttaaagaaaatatgtgaccctttagaacatcaccccacttccatgcctgtcttccatcctctgtataaagagcagagggtgtgaagaatggactagaagggttcctgggtggctcattgttgtgatctgtttgcctgctttggcatgctttgattataataaatatcttctctgaggggagcattttgaggaaagtgattgtaaaagaagatggaaatccatctataaagatggtaaccacaggaactaatttgaagaggtttttcatatttattaatagcatagaattgtccttccagaaagcataaagttctaaatttgaacaaagtccacagtctgaaccaaaattctgtacctttcagaatggatcataaaagaaaaaaagtctacagcacaaaaatagtttcctcctataacctcaaacaaatgtgagggcgatctgcccttgcaattttcattacttcaagataacaacaaggaaactatgattcagttagttctttcctttcacacattcagagttactctgcaattgctgagtgctagtgtatctatcctcaagtggcatttctgtttgagaactgtatttttcattatttagagttttctgtaatttttactggtaatattaatatttaacaatatcatacccccagaggtatctttgtgcaactttagaatatacgtactttgtttctttttatgactctaaccttttattctttcattcctctagtactctgaatataagagagtctacacgctttttagtgaggattttttgatccctgcttcataagtgtcactcattgtaggctttcctttgacaacaaaaattcctgctctctttacgttgactctaattacttcaccagaaaaggtaaacctgtcattgtgtaagaaaaggaattaagttaatgtaactgtttcttaaggtcttattattattttatttttatttttttgagacagagtcttgctgtgtggcccaggctggagtgcagtggcacaatctcggctcactgcaacctctgcctcctgggttcaagcgattctcctgcctcagcctcccgagtagctggaattataggcatgcaccaccacgcctggctaatttttctatttttagtagagatggggtttcaccatgttggccaggctggtcttgaactcccgacctcaggcgatccacccacctcagcctcccaaagtgctgggatgacaggcatgagccactgtgcctggctcttaagggcttaatgtgaatgttgcatacacatgtaatttctgattcatttgtggacctttgcgtaaaaataaaattttcttagaaattcatagaaaaacatggcagttcttaccatgcatcacagtcaatttcctgagggttctgttctttggagtctggggaggggaggtgctgtggtttggatgtgtttttttcccaccaaagcccatggtgaaattcaatcctcagtgtggcagtgtggggagatagggcctagtgagaggtgtctgggtcatagaggtatatccctcatgaatagattaatgccttcctgctagggtgagtgagttctagctctcaggggaatgggttagttcccttgaaagtgagaatgggttgttaaaaggagtctggcttccttggttttgctcttttgcttcctttctcagcctgtgatctctgcacactttggctctctgtcactttccaccatcagtagaagcagcatgaggccctcaccagacacagctgcctaagcttggggtttccaggatcatgagccaaataaacctcttttctttataaactacccgtctcaggtagtctgttctagcaacataaaacagactaagacagaggtcttcaataccaaaagatagtctacttgatgtgtgaagggaggctttggtttgcctgctataaaataattttagttgatgaacccgaagttccctgaaggtttagtttctggtgactttcattctgcaattcttgcacaaatggaaaaaaatccatcctagttgaatggagtacctacactacaaatgtagagtgaatctgtagaaaccactttttagataactgataaaccagctagttgctaatcacttcattgctgcttcccaccaccagtcaatgtttaaaaaaaataaagaattctccacctaactttgacaactggggaaaggtaggactttgtttcagcatcaaaaggaagtagagccacgtagaattatcatttagttccctcagtcatagccatttctcatttttcatcttccctacttttctcagggccatttattgtcctctaatgcctcccttctcttcattcttttttgctcttaatatctctggagggacaccaaagaagtgatttctttctgcattcattaaaaataggtttatgttttgccttcctgttcaattcccacttgggctgtaagcaagtaactaaagcaagggaagggttgggcatgtgggcgccagacttagatgcctctatttatgcctagattcttcctatttctcccattcttccctcaggataggagaaaaaggaggtggcagaggtctgattaaagcagggatgagcaactgagccaccactgcagtgctgagattgggtgaagcccccagcttcacagaaaggcctgcaacatcattgcaagattaaatgtgccaatattcttgctaagttactactttttgcacattaccagagaatagacttcccgggcctaaaggaatggcaatgttttcattgtcatttatttctctgttcagtaaggtagatagtacaggttttaagagtcttcttttttttcctcatgagactctatttcttttcccctctattttcttctatgctaaatggctgtatctactcttgaaaatacattctaactctaagtgtcctttgtggatttgactttaggaaaccaaagtagcttcccccaagccaccctctgtctctcttttttgtttttttgcccattggtcgattttaccttctttttgtataccatcaacccaaagacacagcatactagggacgtaagtgtggaactgataccgttagttttatttcggggtgatgcaatccctctgctaattcttagatggtcttatggtgtcagaagaaaatttccttctgtcagaaagccttaagtacgtttggaaaataattcagaatcaaggctgtcttcttctgttttttaatcaattcactaaatagtcttcatcatacagagaaattattccttctactccactccaaactaagacattattttgaaatagattatcaaataatagtgcagactaatttccatagctcaatgagtagaaggcaaagtacattatttgctaatgcaaatgctgagccttctccaaaaaatttaatattcaaagtccagacgggataaggagacaaaaaaagattgcttaacaattttccaaaccaaagtgacctataacacacaaaatatggttctattatgtgcaactgatattttctttgttgagaataatgagctacagcagaatggcataatgtagaactccacagctgataagctttctgcataagaacaggaagaggacatttcttaaagagttctgtgttcattgcttaccttgaggaggcagtgaatggaattactgttaatagtaacaatatgaagctaattggtttaaaatgaagcagcaggaaatgctgatgatgagactggggtatatgaaggaagaatgaaaaatctatactccggctacacaaaaatgatgcttaaaatgtaacttaatcttgatattttattcataaatgacaaatctgctcactacactgattccctaggtgactcatcaaatcccatctctaggtttatgaatctcaaaattttgtagctagttctgactgttttcactggcaaaatttgtcaaaatcaacttcttaagaatttggaaattaacccaaagtttgcaataatacaaaaagcatttacttttttaaaaaatggctgaatcccagtaaaaacagtgagctttgtggcattttaacttgcacttataaccatctgcctctccacagcttcacagtatccttgaaaatcaacagctttgcagccatgatagctatgaaaactagcagcctagcagccactggaggggacaggtcaggtatgaagctcccccaaaattcccattcccagagaatggtcactatttaacctgtctgaaagttccttaagaaagctccattcttatagtttgtctttatttgccttgacttaaagctcatttggtgggaatagccctgaccccagctaattttttgaaataatcagcaaaaaagctttcagaatagtgacactaattgaaactaaaaaaagaatgaccaaaaatttcacaggaaagactggataatgagatgtgtttaggggggtttgaaaagctctgatagatttctggtaatctagaaggccatgcacatatacagggctgtgcacgttcccagaaaagacctgagaagcccctattctctcatctctagttgactttgaggttctgtgcaagctggatgtgaaggctaaggcagagttgtaaactgcctggtagagcattgaagacacaccttaatacacacacatagtcctttggcagtggctgggagacttactggctcaaggcatttaaggaaatctgttcaatcattaggtaattggtaagctaactgagcacagacttctgtggatgcagtgagagataacacagaatttacagaattagtccaggaaagtcactaaacaaacagcagctgcaataataaagggcatcaacaacagaccttagagaggagggaggaatatgaattccagaattgccacactatattccttaaaatgtatagcattcaacaagaagttaggagacatgtaaataaaaagcaaagtatggcccatacacaggaaaaaaggaagtcaatagaaactgtccatggatgttggacttcctagacgaagactttaaaccatctatcataaatatgttcaagttactataggagacatgtctaaagaattaagggaaagtatgaaaataacgttttggcaaatagagaatgttaacaaaggatataaatgatttaaacgtacaaaatcggaattgtggagctgagcagtgtaatagctgtgataaaaatatagtggggctcaacagaagaaagaataagcaaacttgaataaaggccaattgagatgaataaatagaagaacagaggaaaaaagaatgaagaaaaacagtatcaaagacctgtgcagtgccatcaaatgtaacaacacatgcatagtgagagtcccagacagataagagaaaaaaaggggatgaagaatatttgaagaaataacagctgggaactctccaaacttgatgaaaactattaatccacacatgcaagaagcccagtgaactccaagtagggcaaactcaaagagatccttactttactacattacagccaaactttctacagctaaagacaaaaagagaatcttgagaatgccaagagaaaagtgactcattgagttcaagggatcctaaataacattaacagccagcttctcaacaaaaaccatgaaatccagaagaaaaaggaatgacctattcaaagtgccaagaattttacatccagcaaaaccaccagttaaaaacaaaggagaaattaagacatcctcagataaactgagggaatcttatcactagcagatcttgctccacagcagatagtaaggggaaaccttccgggggaaatgaaaggatgctggacagtaactcaaatccacatgaaaaaataaagagtaccagtacaagtaactgcatttgtaaatataaaagacaatataaacacatttttgcttgtaactctttctaatttaaaagacgaatgcaaagcaatgatgacaagctgtttgataggcttataatttataaatatatacttttttaattgaaatttttttcttttatcatccagcccaaaatgtcataaagatataatttctatgacaataataacacaaaggaggagaaagggaatgaagctatattgaagcagttttacatataattgacggtaaattggtattaatccaaactagattattttaagttaagatgttaattgtaatctctaaggcaaccactaagaaaataaagatatagtaagagaaacaagaaaattaaaatagtatactagaaaatttatatgttaaaaagaagaaaacctcaagtcaataactaaaacacacctcaaggcactggaaaaagaagagcaaattaaacctaaagcaagaagaagaaaggaaataataaaaataagagtagaaataaataatttagagaacagtaaaacaatagaggaaatcaacaaaaccaaaagtgtattctttgaaaagatcaagaaagttaaattaacaaatctttacctagactgaccaagaaaaaaaaaagactcgaatttcaaattattaaaattaggactgtaagaggggatattggctgtgcagaaataaaacaaaagattataagggaatgccatgaacaactgtatgccaacaaattaaataatcttggtgaactgaacaaatacctaaaaaaccacaaactgttgaaaccaactcaagaaaaattcaaaaatcttaatataacaaggatagagattggattcgtaattaaaaaaaaaaaacttcccacaaagagaagtctaggccaaaatggccttattaatgaattctaccaaatacttaaagaattaacaccaatttcataagttctaccaaaaaatagaaagggaaggaatacttctgaactgattctatgaggccagtatacactgacaccataatgagacaatgacatcacaagaaaataaaattaaagatcaatatatcttatgcatattgatgcaacaattctctagaaaatatcagcaatctgaatccagaaacatattaaaagaattataaccatgatcaagtgggatgcatcctgggaatgcaagatgtatttaacatacaaacataaatcataaatcaatgcaatactttaaattaatatataaaatgacaaaaattacgttatgagcacaatagatgcaggaatctcctttaacacagcccaatactcttttatgataaaaatcattcaacaaaccaggaaaaaaacacagaacttcctcaatctgataaagcccagccatatatagaacccatacggctaaaataatacttaatggcgaaagaccagatgtttttccctttcccaagacaaagctagctactctggtcacttctattcaatatagtattgggggtgctagccaggctaattaggcaagaaaaagaaatcaatgcatctagcttgaaaaggaagaagtgaaactatctctatttgcagattacgtgatcgttatatagaaaaccctaatacacacacacacacacacacacacacacacaagttcagcgaggtttcctgatacaagatcaatacacaagcattagttgtatttctgtgtattgacaatgaacaatttggaagtgaaattaagacaaaaattccttatagaatagtatcaaaaagaaaatgcctagtaatagatttaaaaaagaaatgcaatactttcacactgaaaactaaaatatcattgcaagaagttaaagaaaaactaaataaatggaaagaaaactcatgttcatgtatcagaagactgaatacgtgaagatggtaatactcccccaaattgatctacagattcaatccaatacctattagtatctcagctgccttatttgtagaaattaatgagctgatcctaaaattcacatggaaatgcaaaggacccaagatagccacaaaaatcttgagtaagaagaacaaagatgaagaactcatacttcctgatttcaaaacctgatacaaagctacagttatcaagacagtataaagcataagaacagtattggtataaggagagacatataaatcaatgaaaataatttatattttcagtagttcagtagcaggcttttacagggttaactgattttcagtaagagtgccaaggtaatccaatggaggggaaacaggctcttcaacaaaagttctggacaactgaatatccacattcaaaggaatgaagttgtaccagctcacatgattcacaaaaattaactcaaaatgaatcataggcctaaatgaaaatgctaacactataaaactcagaagaaaacatagaagaaaatcttcagaatcttggatcaggcatgacttcttagcaatgacactgaaagcacaagtgacacaagaaaaaatatataatggacatcatcaaaattaaaaactttttgtgattcaaatgatattatgaagaaagtaaaaatacaatccacaaaaatggagaaaatatttgtaaatcaaatatctgataagggttttctattccaggtatataattaattgttatagctcaacaataaaagataagtgacccaattttaaaatgggcaaaagatttgaatagacatttctccaaaaaatatatgcaaataaccaataaacacatgaaaagttacacagcctcactagtcatcagggaaatgcaaataaaaaccacaatgaaataccacttcattcctactaagatggctaaaataaaaaagaccataacaaatgctgacaaaggtgtggagaaattgtaactctcatatgttactggtgggattataaaatggtgaagccactttggaaaacagttcagcagttcctcagaaagttaaatttagagttaccatatgatccagcaattccactcctaggtatacacccaagagaattgaaaacatatgtggatacaaaatttgtacataaatgtttctagcagcattattaaaaatagccccaaagtctaaacaattcaaatgtccatgaaatgatgaatggatacataactgtggtgtatctatatgatgggataaaaatttgtcaataaaatgaagtacttatacatactataatctggtgaaccttgaaaacactctaattgaaaaaaactaatgaaaaaaagaccacatattgtacgattctgtttatatgaaatgtccagtgtaggggctggggaaagtgggggcggggtagtgactgctcatggttatggggtgtcttttggggatggtgagaatgttctaaagttaagacagttgtgatggtcacacaactctgtgagtacacgaaaaccactgaattgtacatattaaaggagcaaatttaatggtgtgtgaattatatctcaataaaaaataatgtggtgtaaatctggccactcatggttttcacctcccttttttttttctcccctattgggacaattcataagttaccatgctgctggcagctctggcagaaaatgatggtgacagaaaatgacatttcaggaatggcttttaaggcacgaggagcaatagcctgaggataatcagagttgttaggctactctcctgtcctggaaagtgaaatcaacctgattctgtccatcatggacactggtgacttgagttgttgacgaatgttctgtaaagtttaatatcccctgctacactttaaatacagagcccaatccaccatatctttcaaactcaggctatttcaaacataactgaagtagaacttcaaattagagaaacttgaggccttctgatcactggccagaggggaaaaattgttttttatgacctgaaaatgtatttagtatgaaaagaaaatgacttcttaagatgagaataagaaaggggggaaataaccaaatttgaagttctaggtaaatacaataaggcaactgaatagacactcctttctcctgttttctattaggattataattggggattctatctccatccaatagtgtttctgtacacttcaaaggtaggctaactatttaaaccagagacagaacactctgtattactctttttatattgatgtcctgttacaaccatgttttgtttcgttttgtactagagaaaaaagaggactcaaacttatgttgtcaaatatttcctagacacttttgtgtgtgacaggaaggaaacttgttaatactgctgtctcaggtaatactgcttttttagttaatactgcccttcatccctgtgtttaccccctcgagcttatcctccctgttatctgattggtttgtcaacattctgaaccaaaactctattttttaatggaaagcctaaggaggcactttttcctgaaagagattggtgtccctgattatacttactcagagccttctctggattactgggaaggaacacacctgtgcatttgatcttaacaagctctaaatctatattgtgttgctcaggggttgcctgacagagctcagtcccatggtggaagaaacctaccaacctcggtcttctcagctttcaaaggcgacacctgcctctggcctctctctgcattctccccattatgatgtggttctccagaccagggaagagaccagggggaaacacaaactaacacaacaagctccttctggttctgtgtgtagctctttgcaatttccctgctctggtaggcagcactttccaatcagccctgcagctccacctctgagaattcttcatgaggaacaagctttctttagtcatagtcacttgtataagaagagatgttttccttcatgagttgtttgaaatgcagtacagtcattccttgtgttctgaaaagctcccactaaatgacatcatttaattccaggatgctcagaatacttaataatacctttggttttgtctttgcaaaacaagttttgtgtttgtggaagggaacaaatctgaggagtggcaagcggcgaagaccaaaagcttatctgtgtggaattgctgctgtagacaagaacaatataatcctccctgttctgtacctactaaatcttacaaagggttagaaaaatagtatttcatctgtctttgggtttttgataataccaaataacatcaaatggaagcagtctcatggtttcttcattgctaaactaattgttattacatacttgttcctgtgtgatgttaatatatattcctggaaccagaaaggtctacatggtcaaataaatttgaaacttgcattaaataagaataaattgatttttttctccttcagggtttcacagaatctttaataccaatgtgcttttttgaacctcttaatgcagctctggtaggctgactttctgtgtgtgtgtgattattttatttactgccaatctccttaaagttagtttttatttaaaaattatttgtataaacacctgaactatttgactttttaaaaattccattctattgtgttaatagcacttaacatgcgatctacctctgtaaaccatttttaagtgtacattattgttgactgtaaggacaatgtggcacagtagacctctagagcatatttatcttggttgactgaaactttatggctgttgattagtaactccccatttagtaactccccaattagtaactctccctagccctggaaaccacaattgcactctttgattctatgagtttgacaatttcagatgccttacacaagtagcattatgtagtatttgaatttctgcgactaacttacttcacttagcataatgtcctcaaggttcatctgtgttgtcacatattgcagagtttccttctttttaaagactgaatagtattccattgtatgcaactgtgtatgcatacaccacattttctttatccatttgttgatggatatttaggttgtttctatgtcttggctgtagtgaatagtgctgctgtgaatataagagtgctaatacctctttagatcctgatttcaattttggtgggggatacatacccagaagtagattgctggatcatgtggtagacatatgtttgttttttttaagaaacatctatactgcttttcatagcagctataccattttacgttcccaccaacagtgtggagcggtctcaatttctccacattcttgacatttggtgtctttttaaaaaaataatactcatccagacaggtgtgaggtgagctctcatagtgcttttgacttgcatttccctgatgattagtgatgttaagtattttctcatatacctgttgtcatttgcatgtcctctttggagaaatgtctattcaagtccttagcccattaaaaaaaatcatgttactaggtttttttttcttttttactattgagtagtaggaattccttgtataggttggagaataacctcgtatctgatatatggtttgcaaatattttgtcccattcagtaagttgccttttcactcagttgactgtttcttttgttgtgcatgaactttttattttgatgtagtcctacttatttttgtttttgttccctgtgccttttgtgtcatacccatgaaatcatggccaagacgactgtcaagtggtttttcatgtatgttttcttctagcaggtttacagtttcagatctttaaatgtaaaataataatattgaattgatattttgtgtatgccataaggtccagtttcattgctttgtatgtcacgtccagtcttctcaatatcattagttgaagagactatcctttcccattgtgtattcttggcaccgtttgtgatgaccagttgaccatgtatgcatggatttatttctgggctctttattctactccattagcctatatgtctgtttttatgccagtatcatactattttgattactgtggctttgtgatatatattgaaataggacgtgtgaggcctccagcttttttcttctttctcaagattgacttggctaagaattttagcattttgtctatttatgtaaaaaaatgccattggaactttgataggaattgcatttaatctgtagattgctttgagaagtatgaacatttcaataatattagatcttccaatccatgaacatttgatatcttttcatttgtttgtttcttgttttatttctttttactatattttgtagttttcagtctgctttcaacttcttagttgagtttatttctagatattttatttttttggtgctattgtaaatagaatttttttcctaatttcttttttcagatagttcattgttagtgtatagaaatgcaagtaatttttatatattgatttggtatatatcaatatataccaactttactgaattcattttttagttctaacagttttttttttaaatggagtctttagaattttcaaatatataagatcatgtcatctgcaaacaatgtggacaatttcacttcttccctttcaatttgggcaccttttttccttgcctgactgctctggctaggactcccagtattatgttgaatagaagtggcaagagtaggcattcttgccttgactctaatcttagagaaaaagctttcagtttttcatcattgagtatgaggttggctgtgggctaaccacatatcaccttaattataatatgttgaagtaatttctttctgtttctagtttgttgagagtttttatcatcaaaggatgttgaattttgtcaattgatttttcagcatctattgagatgatcatatgatttttatcttttattctgttaatgtggtgctaattggttttcatatgttgagccatccttgaattctacagataaatcccacttggttatggtgtatgatccttttaatgtgcttttagattcagctttctagtattttgttgaagatttctgcatctatgcatatcagggatattggctgcagttttctcttcttttgtactgtctttatctggctttggtatcagcataatgctggtctcataaaataaatttggaagtattcttccctcttcaagtttttggaagagtttgagaaagatcgacattaattcttctttaaatgtttggtagaactcaccagtgaagtaatttggtcctgggattttctttgttaggaggtttttatgatagacagtcttgcctcttgaatgaatatttatatctcaagaagctagtgttctgtgaaagtttgtgaatgaagttttagattcataccctttaacctaatgtaataattaagagaggagactttggacaaaaagtactggattctatttgtgggtctctaccaattaacttcatttacagaattagcatagtaatacttgctacaaatcgagttgtgaaaatttagtgaaatatatgtatactaacaaacaaaaccccaggcacttaggtggccttaaataaatggtagctattattgtgtataaaaaagttagtttagtcaacaccttttccagcaagaagcaagaatttctttcgtttataataataatttaataaaatttcctaaaatgccttctgcatgatgcaagaatgatgaaattatatgcaatgttcagttcgattttagtggttagcacaatttatggtattttattgtttaggaaagggagagtaaagaacatctattgagagtttatttagtactcataccagtcttagggagtaaaaattatctaaccccacttcactgatgagtatgcttcagtaaattgctaaagttcatggaaagcatattctgtggcaatgttagaattcaaacccaggtcccctgactccaaagccaatgctgtctccatactgccataccaccttctttaaaaatgaacaatttggctgggcatggtggctcatgcctgtaatcccagcactttgggaggctgaggtgggcggatcatgaggtcaagaggttgagaccatcctggccaacatgttgaaacctcgtctctactaaaaatacaaaaattagccgggcgtggtggcagttgcctgtaatcccagctactcaggaggctgaggcaggagaatcacttgaacccaggaggtggaggttgcagtgagccgagatcgcaccactgcactccagcctggtgacagagtgagactctgttaaaaaaaaaaagaacaattaattcttgtgtgtacataatagctctctgttaactaaggctattctattcttcacttgtttcaaataaatatctcccctactagatctcaatacagtggtcttaagtcaatttaatcccagtaatgttttatagtcattttctcagaatttctctcatgttcaggtaaggattacataattgaacacaaaattttatcttgtctaagtacttctgacttcacagggaattgtgataaggagtataactcagtggagatgatgtgggatggtaggtggaatgctggccgtggccttagtagtgatcttagtccttcccctgctttaagtccctgtgtgacccagtgagttactctgtatctttaggtcttagttttcttactatttgctctatctacctcatgggagttctgtgaagagtagattaactcacttttccaactctccctatctgtagttgtctcaaagtggagaatgcatactccagggatgagcaggatggttcattcgggtagaggaggatgacatcaaggaacacttataggtgctttaaaatttgttcttttaaaatttacgtttttagcatatgttttataatgtatggacatagcattacatttatgaaaaccataaacacacaaacatatattggagatatgtgctttttttttaattaataggggtaggtgataaaaatgtcgagggcctggtggcctccaggataaagtccaaattctttagtatggcatttatgtcctctggggaccctccagcttcatttcctcccccattgcttctccttctacttaatgaactgaacatactagtatgttttgtagcttcactgtctttgcttatactactctttttgccagagactcctgaaacctctctcagcctcccaccttccacttgaaagactaatttctcaagactcagcaaaggagttatctcctgaataagccctttcctgaacctctcaggtatgccagatcactccttccttgggcttccactgtactgtacacatgccacctataagctgtgtggaagtgtgcttgtttgatttcatttactagtctgtagatctctgtattactctacactgctataaagatactatctgaaactgggcaatttatgaagaaaagaggtttaattgactcaaagttccaaatggctggggaggcctcaggaaatgtacaatcacagtggaaggtgaagcagaagcaaggcacatcttacatggcagcaggagagagagagagagagagtgcaggggaaactggcaattttaaaccatcagatcttgtgagaactccctcacgatcactagagcagcatgggggaaactgcccccatgatccaatcacctcttaccaggttcttcccttgacatgtggggattacaattcgagatgatatttgggtggggacacagagccaaaccatattaagggcaactgccatggcttcttaaatcttttttgttttagaacctaaaatggtccctggtatgtatttcataaatattgattagctatgcaaatagcaaataagctctgagagtactatagcatgttaaaatctccaggcaaatgttaatagttattattattaacctacgttaaattctcataggtttcagtggaatatctttattaaaaatcttaatcaagtgacgtgagcaaaacaatcctaattgacacctgtagacactggttttcaaccccgggagctttcaaaaatatcagtgcccaggctctgctcataggggttttgattcaattggtatgggatatgggtcaggcatctgtggtttttaaaagctccccagatgattttcatgtgcaggcagggctgagaaccattgtttcaaatgtcatggataggaaaagaaaggtgcttgggaaaacctaaggcagagtgctcttcctgaaaatgcaactgcagttgtgaaagcttctgtctttgtaaggttaagatgtgtccttgggggaagacacacacacacaaattgcagttatttattgagaccagactactaagtcacttcgatgaaaacttgagagcttaagactcgccagcatgggctaagaatagatcacattgcagaaaccagaacagtttcttggaaggaatggctgaagacattgacaaaggctgagcagaggatgaaattgggaagtcacccatcaactatgggggttgggcaacgtgaaaatgtgcttaccatttgcaatgaaatggaaaaggccttggtgagaaggcagtggagattaatgataataagtcatgttgagttttaacaagataacatacaggataacaaaaaggcaaaagtttattaagtcagatcctgattttgcaactaacaccttttttcctccctctctttttcaccttgagactgttacagatagctgagtaaggtgccaaattagactcgaactgcatctcagggtgaaaactgtgagtgagcatcagctaatgttatcctaaagtgtatggaattacaagtttctatgaagatgtttttgagaaaccttattaggattagtgcgtatgttgtcaacattggattttctagagaatcagagtgaatatagctggtacataagcattgttaatttgcatcatggatatcaaagccttcttgatagaaattacctatttgcactgcatactaatttgggcattgctgctctggaattgataaaagtttagcctataaattggctgaagttccttttgtgctaagaaagaatttgctaagcagatgcataatgtgccattggccattgcggttaatttttttaagagaataaatatttccaagcacttaagtgccatgtgttacaaatcacaccactcagggactagttgaggcttcttttttccttgaagtcgggcaggcaggacctctagtggcaatggctagttagcagttagatttagtgctaatgttttagaaagtacaaactgcacttcttttaaattctggttgatagacttcaggttgatattccccccaataatttaagctttgcacattctaattccctggtgttcaaattgtcacaagttcttgctgtgtacatatttcttggaggaacacttttaaagaaaatggcttcaaagattcccaggcaaagtggacacctggacctgtaaaaggaacgctgcccctaagatgtggaaagaggccaacaaatgttttaattggttcttgacttcagtactactgactttttctcacatggcacactgatgcccctaaatacccatttgtcctctgaatttggtctttcaaacaagggtgagagatgattttgagagtgagaagagagctgttctactggggaaaagggcacagggagggagttttgacaggtatttgtggtggccacagccagtgataaagcaaacactgcagctgagttcaggccccactgtgaacgggcctgcagttacatctcactcctctcttctgtcagttgggtcccatggggtccactggcaggacccactccaggcaggtgtccctgagcctctcctaaccacctctttctcctccatgtctttgctctctatgtggcgggggcaagaggggagcaaagggcagtagtggcttgtgtgcaggcagccagatgggagcctgaccttgggtcacaggcacacgaaaggcacagcctactgatgcactatttggcctgtgctgtgaggaggggggtgcagagggagagaggaagagagaagaaaactcctttcttctatctctaacctaggcatctagtgcatttcagtcctgaattctttcagggctcagctgaaactgttacttcagaacccttccctgatcaaggtcaggccttccacgggctttttgtagcttcctgtgcttgtctctaccagcacttattattattaccatgaattacttgtgtaaatatttattatctgtgtcagtggatgataagcttcatgagagcagagattggtgtctgtactatttatttttgtattcttatgcaggaggcctgagacaaagtgctaaataaatatttgttgaatgagtgagtgaggcaacaaatgaatcaatgagatacacaagaacatatgtataagaatgttctttggaaataacctagagtctagcaagagggaaacaaatcatggagatccatttgtttgaatatgtcattgaaaggcatatctcaaaaaatatttactaacattgaaaaattctcagaatgtaaggttaagagaaaaaagtagggacacaaaaattgacatatggtatgattcctttttctttttttgacataaagaaaatacagagaattcttactattcatggtagttatattctataaggtcactacaaacactgaattgcaaatactgaatgattgcacctaggggaaatacagagttaggctcctgcaagcctctggtcacaatatttttgtcaactgatcaatttataaccttgttttatatgtgtttctgtttaaagacaccttcttttaatatatattattgattacttaacattgaaatcatgaccaacagcactgtcacttatgcctgaaagaagcttatctaataacacacgtattttctcaagacacatcacagtcttgctatgctttggacaccagacagtgcttcagctccatgctgcaggcgattttaaaccacaagaccactaacaaaaagcatataaatatgaaaaatatagcactaagtagatcttagaaaagatacttgtttacagtatgagagctgaaacaagaaggagaggcatcaccttgtttgacttcgcctgggcatgtatgcatcagccaactcaacctttttgctgctctgagcatgtgcatgcccacaaataactgaaatgcactgtgagtattgatttgcggttacaattcaattttagcaagtaggggaatttgcaaatacaaaatctgtgactaatgaagattgactgtatgtccttaaaacaaaaaaaatctcagggcaaatctgcccctcgtggtagcgggactatggtgacataaacatttaaagatgtatccttttctttaattcctcaaatttctaaaattaacttgtattattgtataagtaggaaaataaatattatttttcttttattaggaaatggcaaaatgtgatgggcagaatatatatagagaaagggtagcaaaaatttctttggccagctgtggcacagtaagtttaaacgtaaacagccaaaactgtcagtagagtagtttcaaaaacatattgagccataactttgaaatatattttgagccgggcacagtggctcacgcctgtaatcccagaactttgggaggctgaggcgggtagattgcaaggtcaagagtttgagactagcctggccaacatggtgaaacctcacctctatcaaaaatacaaaaattagccgggcatggtggtatgtgcctgtaatcccagctactcggaaggctgagacaggagaatcacttgaacccaggaggcagaggttgcagtgagctgagatcgcgccactgtactccagcctgggtgacagagtgagaccctgtcttggtgggaggtgggggagcggggggagggggaagaaaaaaagaaagatattttgaattctctcttatatgacttttgtgaatggccaaagtatcattctgtagtcaggaacaggctgactttttgagccagggcttcaagctgaacaggagaaagagacataagcatgaacaagacctatctctgcaagcagaggtcagccacttgacaaaggcagtgcaaaggggatggctttctccggaaatccctcgcttcagctactcatcctccacctcctgccaagtctaggttaggttcccctcagcagaatgtccttctctgttctagcactccccacactgtgttgtcattacctgtatatgtctgtgttcccaactagactttaagctctatgagggcaagggctgaatgtagcttgctcactattgaattacattgcctgacacattgctttgcacgcagtgagggtgaagtaaatatttgttcaatatataacggaatgattatgcatcaaacaccccaactgatagcgactcctgtgagaatcgtcctctttaaatataagtcggtgtcagaaacaacgccaaacctcaaaaaagaatattgaagagttcaaatgagaaaattcaaacaccccaacagacagtgcctcctgtcagaatcgtcctctttaaatacgaagctcagtgtcggaaacaacaccaaatacaagaatagtgaggagttcaaatgagaaaatttcagtcttaaaaaatagacaagatttcatatactcaggcaaaaagagatagaaataagaatctgcctacgtgtgaaaggcaaatacaattcctgtttcctttatcttcttacgattgtacaccctgttcaaccatctttgggcttgtgattactgggtagtacactgctatttcttgaagtgtccataaacacagatagcagagctcaattcctgaaatgtgctcctgtttgataaggtggattggactggatcttgttcagcctttaatctacttccttaagcatctgaggatgttccaaactcaaggctatttcagtacctttgtatttgcaatgtatgatgctttaaaatgataactgtattaactttctatggcctttataacaaattgctgcaaacctaatggcttaaaacattgtaaatttattatcttatagttctatttatcagatatttgcccagatcttactggacaaagattaaggtgttggcagggtacattctcttctggaggctctaggagagagtccatttccttgcatgtttcatctgtagaaggggggctgctttcattgtcttgtgcccaccttcctccatcttcaagaccatcaggctgagttcttcccatgctaccatctctctggttccctcttttcattcccccttccactttcaaagacctttgtgtgattaagcccagcaaaataatccagaataaaaaatcttattttaaggccaaccgtttggcaaccttaattccatctgcaactttaacccacctttgccgtctaccctaatatattcacaaattctggggagtgggatgtagacatctttgggagttgatatagtttggatgtttgactactccaaatctcatgttgaaatgtaatctccagcgttgcaggtaggacctcctgggaggtgttgggttattggggtggatccctcgtgaatggcttagcgccatccccttggtgatgaatgagttctcagtctattagttcacacaaatgggggttgtttaaaagagcctgggctgggcacggtggctcatgcctgtaattccagcactctgggaggccgaggcggttggaacaactgaggtcaggaatttgagaccagcctggccaacatggtgaaactccatctctactacaaatacaaaaactagctgggtgtgggggcacgtgcctgtaatcccagctactggggaggctgaggcaggagaatcgcttgaacccgggaggcagaggttgcagtgagctgagatcacaccattgcactccagcctgggtgacaagagcgaaactccacctcacaaaaaaaaaaaaaaaaaaagcctagcatctctcttgccacatgacacgctggctccttttcaccttctgccatgattgaaagcttcctgaggccctcaccagaagcagatgctggcgccatgcttcctgtatagctttagaaccataagccaaaataaatctcttttcttaataagttactcagcctcaggcattcctttagagcaatgcaaatggaagaacacaggggcaattgctctgcctaccaaaataaatgtacacactattatatatgcatacaaactaggaaatatagtcatttatatttatcaggattcaaaatatcatgtccctatcccaactgtctactgtctgtcccctcactgcccctgaaaaaaagaaaaatatcctaagatgcaaacactcaaaccatggaatgaaatactcttggagataaaaaagtcaaatacttctcttgctatgcggatttaagagaaacatctccacagtatcagttgtgtgggagtttatgtgtaggaatctaactgctcatgagttatctccatgaagtcccgctcacagtatgaatagatgggatcctgttataatctgcttactgtttgccttgcagttgtgcatataaattatgtctaaacccttttcttcttaatcattcttctttcagaaattttgtttatctttctaatttgattagacaaggctctcctatcccccactgcttttttaacagcacagagatagcaggaggattgatcagtgactggagatccacaggggtgataagcttttctgtatatttatgtagaaggcaaaacacagcagaatgagaaatatcagattccagatttcatgtcccatatgtccccatccaaccctgtatcatgcattaaacaaataaaaagtaacagaagggcccagcatgttggcttctgcctataatcccagtactttgggagatcgagatgggcagatcacttgagctcaggagttcgagaccagcctcggcaacatggtgaaaccccatctctacaaaaatacaaaaattaggcgggcgtagtggtgtgcacctgttgccccagctacttgggaggctgaggtagaaggattgcctgagcccggaaggtggagtttgcagtgagctgagattgtgtcaatgcacaccagcctgggcagcagagccagaccctgtctcaacaaacaaacaaaaaaaaaaaaaaaaaaaaaaaaaaaaagggagagagagagaggaaataagtaacagaactagcagcatttcatattccagctaccttttccccatttacaaactcctgagtctgaaacatttgttatatttggttttgagtgaaaccagaatcaataacaaatttgttttgcattcattcctcaatatatttactgcgtgaatatggatcagcagggatggtgtgagactgccacactcaagctgggcgtttgtgcaatccacatcaacacttccaatactctcaagcaaggccaataaatcataaagctcatgtgctactgaattcagcacttcaccatcggcaaaatcaatggagatgcttccagaattttcagttttacagcttcttgaacaaatcttttcccctagtccctctctttgtctgtctggctaaggttgaggcatggacactgggtttgcctcctctccatccaccttctccatccccttttgagaaatgaccacgtggttgaggtcgatcttgtagtcaagccaattgtggtttttccatccctattcccagtgaggcaacttgttgcatgtcattcccctggcaaccaagactggttcagtttgggttgattcgatgctagcagaagttttttggggcttctaggtaaagcgtcctcatccttaagtgaaagtctcaaagagtcatctttccccatcccaaactgattctagaacttctgcaggcatcttattatagatctgatgaagtaactgtcctagaagaatcacagggaggtggagctccttccctatccctgcactcacctctccagttatgcaggaatatatgcattattcttttgtttgtttaatcctgtttgagttggagttttttgttatatttcctcattcattcaacaaataattacaactgtctgctgtgtacaggcactgctttaagcaatgtggattaaaagaacaaaaagggttcctgccttccagtaggaagagtttaaaaagcaaataataaatctaataaatcaggaaactcaacaagaacaagataaagaactagagagtgacaggagctattgggggaaagatgagagcagctgactaattttaaatagggtggtcaggtttcacctcattgaaaaatgtgatttggctcacacttggaatcccagcactttgggaggctgaggcaggaggattgcttgagcctaggagttcaagaccagcctgggaaacatagcgataccttatctctactgaaaaaagcaaaaaagaaagtacaggcatggtggcacacacctgtagtcctagctactcaggaggctgaggcaggaggaccacttgagcccaggagttcgagacggcagtgagctatgattgagccactgcactccagcctgggtgacaaagcaagatcttttctcaaaaaaaaaaaaaaaaaaaaaaaaaaaagtgtgttttgagtagacttttgagtgaatgagcatttgtggatatttggagaagagttttctaggcagaggatactgccaacacaaattccctaagttggaagcttgcttgggaatgtgagaggagaaaggagtggtgggagtgaagtgagggagggcaggggttaacagggagccctgtgggtcttttagcccagtgcagaagcattttgtttggctttgactctgattcaaatggggaaccacagaaggcttttgagtagagtgaaaaagatcactctagctactgtgttgggaaaggattttggagcagtaaaggaaggtgcagggagctgacttagaaggccacagtcccatgccaggctggagatgctgcagcagtggtccagggttgtagtgatgaaggtggtgagcagtggtttggattctggatatgttctgaaggcagagccaacaggatttcctgagtataggggaatgtgggagaaaagcaaggagtcaaggatgactccagctgaaagcaacctaaatcattaactctcaaatttacctgacttgattatcagctatttacaactcatgaatgttacataccatggagaagtccaacccaaacacagggttcacacgcaaaccagtaatttgatattgagggctctacatgttccattaatcacatccccctacttaaaatattttccttggctgccttttaagaataaagttattttccatagtctttgagagttaactcaggtaggaccgaagtgatgaccgttctgtcctctgcagcaacgccattgccctttatccttgttgtgatgtggttttcctgtgtcttctgctgctagatgtgatgacgatatccctcctttgttgatggactcagcatctgtacatgggatattttgactccaattttcctgatgcatcatcctaattgtctggtagttactgactgtcacttaccaaccggtgtgagatattcttcagctcttcatcaggaacagaattacagcctctatctttagaaatgatatatgctgaggattattcatgtttgtaattacaaatctagcagaagtgcaattattaaaaaaaaaacccttggaaaggacattttgttgtataacgcagaacctgctgttagcctcttgtgctggtattacttttgttgctgtaattgccacctgcatttcagttgtaatttaacattatctgtcttctctgtatctttctacctgattgtaattgttaggactcctgccatttattcttaaatactttcttgtctttctgaattactgggctattttctatgattataacctaagaaacagctgcagcaacccttgttgcattgtaaaaacttcagagggctggtttatctctagtttaaaaccagtgaagcaaacagtggggggaccttcggaggtcattcacataaaaccatcattttaagaatgaagaaactgaagcttttgagtgattaactaagttgctcatgatcatttacattcttattgttatgctgtactctggagtagcaagtatggatatatattcagagataggatcttttaagtcctagcactttgcaatttatgctgattaaccaacgacctgccaaacagagctcaagatgggaagggaagcgacactaaatcctttttttgagccagatactgctaggtgctttgtatcatggaccacattgatatgcacaataatctgatgaggtaggaataattatgccaatttctctctctctctctctctctctgtctctcacacacccacacccccccccacacacacacatgctgggatttttgggagattaagcaacaggctcaagagcacacgggtagtaactctcaaatagtaagaactgcttgactttccaccctttctctttctaccaaatcaggaacagaataatggatatcttccaaaggggtgagatatgagcatgagctactttttttttttttttttttttttgagatggagtcttgctctgtcgcccaggctggagtgcagtggcgtgatctcggctcactgcaacctccctctcctgggttcaagggattctcctgcctcagcctcccaagtagctgggactacaggcacgtgccaacacacccagctaattttttgtatttttagtagagtcagggtttcactgtgttagccaggacggtctcgatctcctgacctcgtgatctgcccgccttggcctcccaaagtgctgggattacaggcacgagccaccgcacacggccaggtatgagctacttttaaggcagttggaagcccaaagagcttgggaaaccatgaagactaggcctcacaactgcagttttctcaggcctatgcagctgcctccatccttttgctctgagcaaaactggacctagttaagcaatgttgcccaactgttaaaaaaggaagctcaaaactaggaggtaggatgccagataatttgtttaaatttttgatctttaaaatcttgactctttgagcttgttttgagcctcattggtccaaagtggctcaatctgactgaggaaggggttggaggaggaaggaatgtaaaaatgaaagatcggtgggaaaaggatactgccttaggttgtctgtaggtaaataaaggtttgactctataaaaactctcttcctgaaataatcaagaatgcttcacatcagaagcatcaattaaatggctgccttctttttgttaattctttagtctttagctatttctgctgttgctgcagaggcagagagatggtgaaagaatcaacctcaggaaatagtatggaggtcaagggtcagctaagaggatctactgattttctgatctgcggagctttctgagtgagtctcccttgaattgcaggagggcatccaataggaaacccagtatgcaacaatctcaagagatagcctctagaacactgggattagcattaatccatgaaaatgaggtgctataatgatgatgatgatgagactagaacctatagttacatgcattgtgggaaaggtttgaattgaaaggctgaaggagggagtggttgtcttccaagagggtatgatggtcatgctgaatgaagaatgaagtgaaagaagtcagtgaagatgcattaagaccgtaggtcaggttcaagtagtaactcccaagggttcaaccacataatgacgcattgaaggatgtctattacaatcataagaaacagcaaagtggttgagtatagtggctcatgcctgtaatcccagcactttgggaggccaaggtgggcagatcacttgaggtcaggagttcgagaccagcctggccaacatggtgaaaccccatctctaccaaaaatacaaaaactagcagggcatggtggtgcccgcctgtaatcccagctacttaggaggctgaggcaggagaataacttgaacctgggaggcggatgttgcagtgagttgagattgtgtcactgcactccagcctgggtaacagagtgagactctgtctcaaagaaaagaaagaagaaaagaaacagcagagtgtcccatctgtcctgcgagtcctaaggaaactgattaatggcttcaaaagtttatttctcatcaaaatgaacttgattaattacaaatccagattttttagtcctgccccccaaaagtctgattttaccaatgaaaataacccccaggtaattcctgcaagcagcctcactggaaacatctggggtaggtgaccccaacttctgtcattgtgagtttctgtgtgctacctttcttttttggtttttgtttttaataaacagggtgttgctctcttgcccaagctacggtgcagtggtgcaattatagctcacttcagccttaaactcctgggttcaaggaatcctcctgcattgctgggattacagatgtgagccactgtgtcaggctctctgtgtgttccttctaatagtacttctagaacatctcttatttttttcttttccagctcggagattcttaatttgagtttctggggctcaatgaatagggcccaggggatctacaacccccctgaaattacatgcagaatttcacatatatatgagctatgtgaagagtctcaaaggaatctgtggtttccaaagggtttagaacaattgctccaactgttctatttatctcctttctgccctgacccctggagctggttcacagctttttatcctggccagtcttcctggctttagtggacagtacatttgtctttgactttgaaactttacattaactatgagacatagcgtgaaactttggaaagagaggggatcacttctatgtttctattaaaattaatttcctttggaagaatatgcctgtgacagttttcatagaacactgctgtccccattttaatgagaaacaaaaaaattcatccacgtcaccaatattctattgtgtctcttttctcccagaagccgatctctttgctaaaccatcttcagcacagctccagttgaagtcctttgcttgtctgggtcctttgttgccctcccggtgttctgctgtccacagaatatagccctgactcggtagcctggcatctgtgccctttgcaatctgactacctcctgctgctctcctaattgttccatgttccaagctaactgtgctcctcgccattgcccaagccctgtctgtgccctcttccctctgggcctacaggggatgccctccctctcctctccatctgtcaccgtgtacccttgttcaaggccttcatcccatctctccgtcagccagaaatttcctcttctgtgaacatcaattgtacttggttcatacgggtcttatggcatttgttacatattgatttttgtttgattatgcatgatttgtgtttctcttttttcttattagattccaagacctttcatcacagggcctttgttgatttaactgtgtatctggtcaattgcctgtcacagtacctagcatacaaaaagccctcaataaaatctggtgaatgtatttaaaaacctagatagggctattttaattcagaaaaataaatctgtttgccttttttcctggtaatctaagttgggcagttgcacgagaactgcatataaactgcattcaactcttgataaattagaaaagtcatctgatggcttcattaaaatgtgggctttaaaattatttatgatttcatttttcataacatctttgtgagacttgtagtagtgtagtattccccccgtcttttggatggtgatttcactgaggtgagaggttaaagtgggtcattcaaggccacagagcaggcaggtaacaaaactggcactggaaccttggcctcctggggccacgttagcagagcgtagcattgactgcactaaggatggaatacaaatgtgcttacacattgtcaaatcctgtgggtcaaaaagtttgttttagtgaaagcatcacagataatgaagtatttgaaattttctcttttcaccttttggcatgcaggctcctctctctctgttccctaaataaggacacgtctgtaggtctgatcctcagccctgtctgtctgtgaccttctccagtatccaggaccctcggcgatcaatacctgcctcgtggtttcaatgatcatcactctgctgacttacctaacgtctttgcctatggtgatgacccctgcctgctctccacctcacatctcttgtggtttaccagaagtttccacttagaattctgccatcacttcaaaatccagatatctaaatccaaactcatcatctgctctctgaacaaacttactcctttctcaatctacatttttctaccataattctcctagtcatccaagttcaaaatcattgttatctttaacttcctttatttttttaagagacagcttctcatcccactgcccatgctggagtgaagtggtgcgatcatggctcactatagtttcaaactccggggctcaagtgatcctcctgcctcagcctcccaagtagctaggactacaagcacacatctctgcactcagctattttttttttttttgagacagaatctcactctgttgcccaggctggagtgcagtgctgtgatcttggctcactgcaacctctgcctcctgagttcaaacgattctcctgcctcagcctcctgagtagctgggattagaggtacctgctaccacacacaactaatttttgtatttgtagtagagatggggtttcaccatgttggccaggctggtcttgaactcctgatctcaagtgatccacccaccttggcctcccaaagtgctgggactacaggtgtgagccactgcgctaggcctaatttttaaatttttgtagaaatggggtcttatgttgaccaggctggtcttgaactcctagcttcaagtgatcctcctgtcttggcctcccaaaatgctgaaattacagaaatgagccactatgcctggcctgttattttcagctttttaattggctttgtcttattgatacttccttcaaaatgtttatcatgtccatttgagaatctagagtggtttttttttttttttttttttttttttttgccaaggattacctctttctctagagccctccacctcatgcacattcctttctttctattttcattaccacattgtgatctaggtcttctcttcctcttccttaaatttcactggtgttcattttgttacaggatgaaatccatagtcttcaacctggcatacaaaacctcccacaagctgactccagttgatctttccaactttctagtctaatacttgcctctggtaattttttttccaattcttctgttgactgtcctggaatgcatcttacatggccttgctttggtcctcagtttagttcttttattttccagtttactcctttggatacttctcatcttcaaggtccagctcatgtctcatctttttgatatgaccattcctaattatttaaatccatattctgaagttcttggcccttgttgtctacatctttgctgctcaaagtgtcattaaatgagcagcagcattgtcaccacctggaagatggttagaaatgaatcttggggctctgcctcagacctgctgaattcaaatctgcattttagcatgatccttgaagtgatgcatgaaacacttgtctgtcccatttagatacttagataatactcaatccaaacaccaacttatgtacttatctgcactcctcaagatccttgaaatctgcgaacctgttttatttttctttagtatctctgaaacacaatttcatggtaaagtaggtgcttactaaatagattttagtgtccttctctttctttttctatttaaaggaggaaaaaactcccaagactcctagaaagtgagcatgagctgctatagtttgaatgtaacctcttcaaaattcaggtattgccaatgagatactgttaagaagtgaagcctttaggatgcgattgagccattagggctcctcccttgcaaatggaacaaggtcagcaaaccaataggagtgctaaggtaaatgactgtagaacaaaatggtgtttatgtagcttgatggtacatgtaatttcacaattgcattttgtgtctgaaaaacatatgaggttttgctaagcttagtagagaaatgcctgctttgtggcaatgttgtccattagttaaccagagagaaatatgagaacagatgatgtcactatattcttccactagcctaggttcttaaaagctctaagactacaagtgttatagatgactccagcatgcactcatactgctacttaactttcttcatggaaatgtgtcttattctgtcaacagactaaaagaggggcaaggacatatattatataattttgtatatactcgataatgctcaggacatagagcttcagttccttccctccctccctccctcctgcccaccctccatttctttattcctgcctttcatcctttaagtgtttgttgagtgattgagatcaaatattgatatattgtatctatagaatagaatattctattctagtgctattatatatgctggggataaatcacgcattaaaatgaatgtccttctctttatggaacttgcattccagtggagcaaaaagataaacaaaatcataagaggaatttatacttagaggacgataagtactgcagaaaaagattagagaagagggcttggaattggggaggtatactttaaaataaaaagccagagaagaccacctttgagaacataatttaagaaaagacttgaaggaggtaaattatgtagctatctgagggaagaccttcccagagagtggaacagcaggtacagggctgaggtgggcatgaacagggaagagtaagaacggtcttttgggtttgaagtagaaggagcttgcaggagaatgacaggagagatgaggtcagatattacatctcaataggatctctctggctgcaatattgagaaaagccagaagggggacaaggtggaggtgggaagacgaattagaaggccactgcaataatacagacaggagatggtggtggcttagaccagggaggcagccgtggaagaggtgagaggcagttacattctgcatatattccgagagtacagccaacaggatttgctgaaagattgaatttggcatatgagagacagagaggcatccaggatccaggcatttaagatttttggcctaagcaactagaaagatgcagctgccatcaagtgagatgggggaaggctgcggtggagaagtcttttttagggaagattaggaacttagctttggcaatgttgagtttgacatatcttttagacaagtggagatattgaggaggcagttgaatattggtggaatgaacgaataaccaggatcttaatcaagtgtttaactcccttaaacataaatcaactttttgtctacttcctcataatgtgaagcactttgggatgtgacattggaaatcagactcttctgaccaaggcccaggtctgcctgaattccaggcctagagatctgacaatgtgctggccatcttcccttaaatgttctctagagccacaccatgtctaaaatggaacgcactctctttatcccaagcctggtctccctctttgtgactgtggtgagtgggcaccactaggcatgtaagctggcagtcacacttcattccttccatttcctcatctccatatctaattggtcaccaaatcttaccaaccccacttccaaaccatctctagaacccatctcccccctccgtcttcactgctgcttttttggatttatgctctcattgtctctcacctggattatatgtaaatcttctcctacctggtttcccagtctccaatcgatccttcacatagctcccagagtgattttctaaaatgtaaatgtggccatgttactcttctgcttaaaacatttccaaaggctttcttctgtccataaaacccaaaacttgagtttggcctgcaaggatcatcaagatctggctcctgcttatctcttagatttattatcccccccatcccccccgtcactcctatccattggccagattatactacctgtagttagttaacttattcattcaattttcagatataaataggatgcttcatatgttacaagcactatgctaagctgtgggggatacaaagctagacattgaaaaagcctgaaataaacctggttgtcttccttcctacttacttacagtcgtcatacagtaagctgtggggatacaatgctgcattgtacgcagacttggttcctgccctcatgaaagtatactttctcaatttccatgcctttgctctctgaaccccctgccttgaatttaccaccatctgctcctccctccatctcactgccatgtcctccttctcctaccagctacttaaagaataccatctcaacttttaagaatcagcttacatcattcccttgtattaagctctttactctatctccttttctcttctaaaaatgtttcctccctcaaaaggtatcattgaaaaacttaatagctctagaagtgaggatatctctaaatacattccaggttcagttcagaatattgttttatcttatactagaagatcatagctcaaggaatgggatttccttctttatcccaaaagggaaaaaagcctccttttcctggatttttcccatgctccttgggctccacaagtgggataagcaattgttaacttgctgcagagtgagtgaacccaattgcattggattcacacacagtggatgctccaggattttttttaaatatttatttatttatttatttatttatttatttatttatttatttatttattttgagacggagtctctctctgttgcccaggctggagtgcagtggcgtgatctcggttcactgcaagctccgcctcctgggttcacgccatgctcctgccttagccttctgagtagctgggactacaggtgcccaccaccacatccagttaatttttgtatttttagtagagacgggttttcaccatattggccaggatggtctcaaactcctgaccttgtgatccacctgcctgagcctcccaaagtgctgggattacaggcgtgagctgccatgcccggccttcaggatttttaaatagtaaagcgttaggggtggtgagctgattggtaggggtgctaggaaacttgtcttaaagctaagtttgcatagctagcttacaattttcacttagattaatatacatagatttatagtagcttgtgggggactgataaagatgtgggttaaagattccttttaaagccatcccttaatgctaccactgtacagaaagatggcagagtgactgcctttatagacacctgcccacacttcctaatctgccctcagttgcaactcctagagagtaggcacacagcttagggtggaaaatacatgaaaattcagtacttgtaaatagatgggaggtgggtaatgaggatgagcgacagaagaaaaaaccttctatatttgtctgttctcaccacctaaggggttcttcagaaaaccagtgagctttacgctcaggttgagaaatccttgttacagtcactttaattgcaatctctatttcttctctctttttctttctctctctgtgtctctacacctctccctcaccactttctggatatgcacacatatttacattcagatgattttagaaagctccattggggaataactataaattatgaatatgcaacagcactaaaaccaactattatagtcaaaaatcctgaaataaacctcctggttctcttccttcctacttacttacagtcagcacacagcaatatatcttagagtgaggctaaatggatatctgatactcactcgaatgtgataggcagtcaacaacccagttatcactgttgaagcattttaaggactacttccatgtcactctggctatgataaaaaccatagtctccaaattggtacagtaggatgaaccttccatgacgactggtagcatgtgtttgattacacatatgtatacatacatgtacacacaatacacatacctaaacattataaccagattagtatattccttttgcattgtactgaatactttaaaataatgtttcatcagtgattgtcagagttataaaatcatttgaatatattaataagctataaacattttaattttaaaggataaaatatgctgcacaaaagagccagtacagccactgcttatgtgtttaatttatttaaagagatgcctgttctgttattacttcaaatatagttatatctacatgtaagtgattttaatttgctacaacatttagatgtatcaatgagacatttcataaattaaaattgtatcacgtagggagactatcttgattatgaagctttattaggtgatgattataagtgccttgtttaataattataacagcttaatggctcctgtagttatactttataataaaaatttcacatttaataatatggaaagggatggtacacagtgaactgacaaaaaagtattgattctgaacctttaaattggattcctattgatctgatgtatgaatattttattggtgtaaatgttttcagggttgccagtttctattactgcatgttagcaattttactggctatgtataatggacaaattaaatgccaggatatgggcatatccagcaccccacactgattattttgattcacttatcactatacactactagggccttccctttctctgtcccatctctgttctggaaggtgagccacagacttcttctgtacatgcctcagatacatgacaagccagtgatgggtggtctggcttgttatctggtagaggctgggtgggcatgtgtctcttcctgctaaggcccacagccccttagctaagacttacacatttgctccaaggccagtcatttgggcccgagtacctaatggataataacaggggctctgggattaggtagagcaagatggctgaacaaaagcttcaaccaattgtcctccccacaggaacaccaaactgaacaactatgcacacaaaaaagcaccttcataagaaccaaaaatcagcttaggtaccagcttggccacagtggagtagagcaccaagcaggctcttggggtccctgattccaggcctagctcttagatggcatttctggacttgccctgggccagaacggagcccattgcccttctgggagagtcccagtcctgccagcattcatcacaagctgactgaagagctcttgtgccttgagtgaacactggtggtacccaggaagtactcaccatggacctagggtagtggtgatcacagggagagactcctctgtttgtggaaaggggagggaagagtagaagaactttgtgttgaggtatgtgttccagctcagccacaatcgagtaaggcaccaggtatattcctaaggtttctgactgtaggacctggctcctggatggcacctctggacccacccagggtttggggaattcactgccctgaagggaaggacacaagcctggctggctttgccacctgctgattgtagaaccctagggctatgagcaaagataagcaatagccaggcagtggttaccacaggtgttgggtgagacccaatgctgtgctgacttcaggtctgacctagcacagtcccaagggcaatggccacaagggtgcttgtgtgatcccacccacagttctaggcagctcagcacagagagagagagagagagatgccatttgtttgggagaaagtaagggaagagaacaagagcctatgtctggaaatccaaagaattcttccagatcttatccaagaccaccaagtacctctaagagaccgcaagagtcacagtgttactagactcgaggtgccccctaatgcagttatggctacagtgaccaaaaacttagatcacaacactcaagtccctttgaatacctggaaggcccttcccaagaagaatgggtacaaacgagcccagacttagaagactacaataaatatctagctcttcaatgcccagatactgacaaacatccataagcatcaagaccatccaggaaaaataatcttaccaaacaaactaaataaatcaccagggaccaatcccagagagacagagatatgtaacctttcagacagagaattcaaaataactgttttgaggaaatgcaatgaaattcaagataacatagagaaggaattcagaattctatcagatacatttaacaaagagattggaataattaaaaagaatcaagcagaaattctggagttgaaaaatgcaattaacatactgaagaatgcatcagagtctcttagcagaattgatcaagtagaagaaagaattagtgagcttgatgacaggctatttgaaaatacacagtcggaggagacaaaagaaaaaaagaatgaataagaatgaaggatgcctccaagatgtggaaaatatcctcaaaagggcaagtgtaagtgttattggccctaaagaggaagtacaaagagaaataggtgcaggaagtttattcaaaaagataataacagagaacttaacaaacctagagaaaggtgtaaatattcaagtgtaaaaacaccaagcagatttaacccaaataagactacctcaagacgtttaataatcaaactcccaaagatcaaggataaagaaaggttcggaagaaataatataaatagagttccaatatgcctggtagcagacttttcagcggaaaccttacaggccaggagaaactggcatgacatatttaatgtgctgaaggaaaaaaaccttttatcttagaatagtatatccaacaaaaatatcctttaaatatgaaggagaaataataactttcctggacaaacaaaggttgagggatttcatcaacaccagacctgtcctacaaaaaaatgctaaagggagttttcaatctgaaagaaaaggacattaatgagaaataagaaaacatctgaaggtgcaaaaaactcacaggtaatagcacagagaaaatcacagaatattataacactgtaattgtagggtataaactattcatatctcaagtagaaagactaaaagatcaaccaatcaaaaataataactacagccacttctcaagaaatagacagtacaataagatagaaatagaaacaacaaaaagttaaaaagtatgcagtgggggggaatgaagttaaagtgtacagtttttattagttttctctttgcttgtttgttagtctatgcaatcagtattaagttgtcatccatttaaaataatgggttataagatagtattttcaaacctcatggtaacttcaaatcaaaaatcatacaacagagaaaaaatatgcaaaaaataaaaagcaagacattaaaacataccaccagagaaaatcacctttactaaaaggaagaaagaaagaaaagaaagaaggaaggaaggaagagaagaccgcaaaacaaccaggaaacaaatatcaaaatggcaggagtaagtccttacttatcagtaataacattgaatgtaaatgaactaaactctccaatcaaaagacagagagtggctgaatggataaaaaaaaaaaacaagattcaacaatctgttgcctacaagaaacccgcttcacctataaagacacacatagactgaaaataaagggatggaaaaaatatactatgcaaatgtaaactgaaaaagagcaagaatagctatacatatatcagacaaaatagatttcaagacaaaaactataagaagagacaaagaaggtccatatatgatgataaaggggttacttcagcaagaggatataacaattatatatatatataatatataatatatattttcacccagtgctagagcactcaggtatataaagcaaaaattactagagctaaagagaaagatagacctgaatacaataatagctggagacttcaacagtttcagcattgaacaaatgatccagacagaaaatcaacaaagaaatatcagatgtaatctgcaatacagaccaaatgcccttaatagatatttacagaacatttcatccaacagcctcagagtacgcattcttctcggcacatggattattctcaaggatagactgtatgttaggccacaaaacaagtctaaaaaattcaacaaaattgaaattatatcagtatcttctctgaccacaatggaataaaactataataaatcagtatcaagaggaattttggaaaatataaaaacacacggaaattaaatagtatgctcctgaatgaccagtgggtcaatgaagagattaaaaaggaaataaaaaaatttcttgaagcaggtaataatggaaacacaacataccaaaacctacgggatacagcgaagccagtactaaagagaagtttatagctataagtgcctacatcaaaatagaagaaaaatttcaaataaacaatgtaacaatgcatcttaaagaactagagaagcaagagcaaaccaaacccaaaattagtggaagaaaataaataaagatcagagaagaaataaataaaattaaaatggagaaaacaatatgaaagatcaatgaaacaaaaagttgggtttttctttttctttttttcctttctttttttttttctgagacagagtttggctctgtcacccaggctggagtgcagtggcatgatctcagctcactacaacctgaacctcctgggttcaagcaattctcatgtctcagcctcctgggtaactgggattacaggtgtgccaacatgcctggctaatttttgtattttttgtagagatggggtttcaccatgtaggctaggctggtcccaaactcctggtctcaagtgagccacctgctatggcctcccaaagtgctgggattacagggatgagctactgtgcccggccaaaaaaatgattttcttaaaaagataaacaaaatttttgtcagttgacaagacttaaatctaagacttcaagctatgaaactattaaaagcaaacattgggaaaactctccaggcaagtgatttcttgagtaataccttacaagcacaggcaaccaaagcaaaaatggacagatgggatcacatcaagttaaaaagcttctgcatagtaaaagaaacaatcaataaagtgaagagacagcccatttaatgggagaaaatatttgccaacgatccacctgacaaaggattaataaccagaacgtataaggaacccaagaaactctataggaaaaaaatctaggccaggcgtggtggctcatgcctgtaatcctagcactttgggaggccgaagcaggtgaatcacctgaggtcaggagatggagaccagcctgaccaacatggagaaaccctgtctctactaaaaatacaaaattagctgggtatggtggcccatgcctgtaatccagatcttcgggaggctgaggcaagagaattgcttgaacctgggaggtggaggttgcggtgagtcgagatcgtgccattgcactccagcctgggcaacaaaagcaaaactccgcctcaaaaaaaaaaatctaataatcccattaaaaactgggtgaaatgtctgaatagacatttctcaaaagacatacaaatgaccaacaggcatatgaaaaggtgctcaacatcactgatcatcagagaaatgcaaatcaaaactgcaatgagatatcatttcatcccagttaaaaaggcttttattcaaaagacaggcaataacaaatgctggtgaggatgtggagaaaagggaactctcgtacactgttggtgggaatgtaagttggtacaaccactatggagaacagtttggaggttccttaaaaaattaaaatggaactatcatgtaatccagtaatcccactgctaggtatatacccaaaagaaaggaaatcagtatattgaagatatgtcttatctctgtactcccatatttgttgcagcactattcacaatggccaagatttggaagcaacccaaatgttcatcaacagatgaatggataaagaaaatatggtacatatatgcaatggagtgctatccagccataaaaaggaattagctcttgtcattgtcaacaacgtggatggaacacgaggtcattatgttaagtgaaataaaccaggcacaaaaagacaaacttcacatgtcctcacttatttgtgaaagctaaaaattaaaacaattgaacacatgaagatagagagtagaatgatggttaccagaggttgggaagggtattgagggtgcggggaagggacggtgagacagtggggatggtaaatacgtataaaaatatagttagatatttagaattaataagatctagtatttgatagcacaacaggttaactatagtcaacaataatttattgtacatttaaaaataatcatttgtaacacaaagaaaggataaatacttgaggtgatgcatacccatttgcccatgcaataatgcctgtatcatgcctgtatcaaaacatctcatgtaccccataaatatatacacctactacatacctacaaaaataaaaaaaaaacccctggactctggagtcagattcattcaattcaaataatatttattgagagccaaatagcagacattgttccaggtgctaggaacagaatcgtgatcctggcttcatggacttccattctcatgattgcctaggttcaaatcctaactctacctcataacctcaggaaatatgttttactgtctgaacttatctcttaatttgtaccagattcatgtttgttgcaagaatttacagaggcaatgtatataaagcatccaatatcatgcctagctcattgcaagtgtcacttatttttatttttgggtgaaagtctgatgcaagccatatttatgccataaatttaattggatgtgaatatgatctactagttgaaatgactctgatttctatgctttttaatctagtctgagcagcatttatgatacagtaatggccaaaagacaatgaaaacactattatttatcttaataagacaatcctaagccaaaagaacaaagctggaggcatcacgctacctgacttctaactatactacaaggctacagtaaccaaaacagcatggtgctggtaccaaaacagagatagagaccaatggaacagaacagagccctcagaaataataccacatatctacaaccatctgatctttgacaaacctgacaaaaacaagaaatggggaaaggattccttatttaataaatggtgctgggaaaactggctagccatatgtagaaagctgaaactggatcccttccttacacctcatacgaaaattaattcaagatggattaaagacttaaatgttagacctaataccataaaaaccctagaagaaaacctaggcaatactattcaggacacaggcatgggcaaggacttcatgtctaaaacaccaaaagcaatggcaacaaaagccaaaattgacaaataggatctaattagactaaagagcttctgcatggcaaaagaaactaccatcagagtgaacaggcaacctacagaatgggagaaaatttttgcaatctactcatctgacaaagggctaatatccagaatctacaaagaactcaaacaaacttacaagaaaaaaacaaacaaccccatcaaaaagtgggcaaaggatctgaacagacaatcctcaaaagaagacatttatgcagcccacagacacatgaaaaaatgctcatcatcactggccatcagagaaatgcaaatcaaaaccataatgagataccatctcacaccagttagaatggcaatcattaaaaaatcaggaaacaacaggtgccggagaggctgtggagaaataggaacacttttacactgttggtgggactgtaaactagttcaaccattgtggaagacagtgtggcgattcctcaaggatctagaactagaaataccatttgacccagccatcacattactgggtatatacccaaaggattataaatcatgctgctataaagacacatgcacacatatgtgtattgtggcactattcacaatagcaaagacttggaaccaaccaaaatgtccaacaatgatagattggattaagaaaatgtggcacttatacaccatggaatactatgcagccatgagttcatgtcctttgtagggacatagatgaagctggaaaccatcattctcagcaaactatcgcaaggataaaaaaccaaacaccgcatgttctcactcacaggtgggaattgaacaatgaaaacacttggacacaggaaggggaacatcacacaccggggcctgtcgtggggtggggggaggggggagggataacagtaggagatatacctaatgtaaatgacgagtaaatgggtgtagcacaccaacatggcacatgtatacatatgtaacaaacctgcacgttgtgcacatgtaccctagaacttaaagtataagaataaaaaaaaatgtagtcaattgtggtgagtcataggagggatgccaagtgtggaatcaccacagatgccagtcaaggctcaacgtgaccagctgttcagggtgctttgacaatcccaagccttgaaactacctaaaggctccttctgagtcaaatatcaaaaaaatggatcccaaatgactcctaatatgatttctcccagatgctctttctgataactttgtttccgacgttgatatctgatgctctcctaattactttggaccactttcttcctggaagactctatatggctcttatcattgagcagctctttgcaatgaagatgggaaaagacctccactatcttctgttatgatctaaggccctcgatgaggtacccattgcctccatgtatcttcctgggaaggcctttctgaggctttggctggtatcttaatttcttgtggaatatacatactggtgttctggtgctgtgatgtctggatatgttgaggtattgaccataccctggccagtggttttccttttgtttatatggagagagtccctgctctggcaagggaagagatgaagggaagagagggtagaagaggggaggggagggaagaggaggggagaggaggggaggggaggggagggaacaatttactgtgcctttttaaaaagagatcagccaataaaaaggtagattttggagacagacaaatctaaaaaaaaaaaaaaaaaaaagaaatgaaggttccaaattgatcacctaaatcatacagtcctttatcaaaatgcctggaagcctgtctaggctggaggttggctaacagcatacactcagctgacccggggagtactgatttattttcctatgttagaagttaggcctcatctgaaaggcagagagaagggcatcatcacactctatgccctatggactgggattggggtgggcactggagactattcaagagggcatttttgggaaaataggaagagagctcatggtggaagacagggaaagtaccagtagaagccgcattctgacaacattccacaaggagagaagctaattaaaaatgggaacctgacataggccaactaaatgagtatctctggggctgggatctggcagtgatctttcataagaaaaactcccctagataattctaacatagccagaggtaaaaacaacaacaaaaaaccccactactgctccagactagtagttctcaaagtgtaattcgcagaccagcacacgtgggtatttgtagaagtgcaaattaacaggaccccccaccaccccagatctactgaaacagaaactctgagggtgggactcaggaatctgtgtcttaacaagctctccagtgattctgatgcttgctcaagttggagaactactgctctagataagtcataccagaccaaaaaaacaaacaaacaaaaaaattaggaaggtcaggaaggcaggcagggtaaaatggatcagggtggaagtccactgtggtttccttttgtactttagagaagaatgaaaaacgcacattgctcacttccatacaactttggagaggggaaggtatctaacccttcacctttctctctcctaaagctccttcctaggagccattaaatgacagaggcctcttggttccaagtgggttttaggatttttaaataaaatgcagagactaataatgaaatttgttggaccatcagaaaggacagcagatggcccttgtgcctaggagggagggagggagggtaaccgctttccagaccaggaaaaaataaactaagaataaaaagaaaaccaaatgattaaaactgaactttgctttacttttcccttttatttcatgaaagcagtgtttgggcacagtagagatatgttaataaaattgaataatgtctcttgcactaagttttcagtacaagatgaaaactgcataagaacatgttctaatgatgcgttggttttctcacagtaacatccagcccccagaacattctctggcagcacccacactctcctgtcctagtgaataaacctggaacaaagctgaaaatctgaggagctgccgcctggatggggaaggatatgcttgtgaaatgtagcttggctctgttgctgacttagatgggagtacaggaaagtcattagtttctctggccctcaattttctcaagtaggaaatgacagaaaccacccaaatgaactgaaatgtcaaagtgatctccacaggcccaggaagagggccaggtgccatagccaaacaggatagcagaaaatcgcacaggctcatggtgtcacattctggtaaatgggcatgatgaaatttaactaagctgaaaaactgagaagtttagtgatcaaatgtgggccaaacattctatgggcatttttgttgttgcttattttaatggtcttttcctcctcatactcacatgctgtgcaaaaattatataattatataaaaaatatgaattatataagtaaagaaccccaaccaaatctcaactgattttgtgaaaaagaaatatcttttttttgcttactcttaagttctttttatcagaaaacaaataccacatgggattattattttaaacacaagctgcatttaagagaaagtgtctagtaaaccttctggggctgtaaattagctgctaattttgtttgactaaaggctgtaaaatgcatttctgggaattattgtgcacagagaacatcctcctaatacttcagtgggcttgaacagagaaatggaatcctattcagtatacctgttactaaactgaggctactccacgacccaggctcattctatctaactacatagccagcttttctggatttgtgaaagatgagattttgggaaagaacatgagaaacaatgagtcattcacagacacataagtagagatttgaaattggtgttcagaccatctaatcttcacatttcctcctttgttcaatctcattccagtctctgaaattttccaagggcctgtttattactctgttctattcacctactgctatgttcagttactgccccctgtttctctaatggagttttgctttcaagactgggcacaactcttctcaatatgtatttacatttttcatttccttatacaagttccatcattttttctttatgatagttttctttaacctgtttattcatttgtttcatttgttatattttcatgttttttatcctggtccttattttcctccatgacacctcttcttatacttgatgttgttctctagaatgctgttaaatttgctacctgtctctttcaaaatttacctgggcaatggtagcacacaaagggccatgcagacttgccaatattaggctggtttggcctagcatagtacctggcacacagcaggcattcaatcaatatctgttcagtgactgcctgaatgaaaatagaaatgatatcagtagttttttgcaataatcttaagcaaaattataaactaataacttccactcctttaaatgtgtgtcaacttttctgtactaattggaaaaacatctagttcatgtggatcaaaattgagtctatatgctacgtagggcaaaggcatgcctggattttaacatctcatcctcagtgactctaatggtgcctggcacagaggagatgcccaataagtttatatgaaatggcttagaatggactaccttctccatgcgactaatgatctgttactacttcctgaaaggttagccattattgatataccacttctagatgctgtgacaaatggcacagctcagcagcaaaagtactttttaaagtctatgggcctccacaggttgagtttgaaaaggatctgttaatcctctgaaattacatgtgatttatggggagaaagtttacaaaattattaatactcttgaaggggaatatgacctccccccaccccaaatttcagaaccacagtggataatgaaagtttctatgctgtaagagcaattaggaagtcctgaaaaacagggaatttagtcaggagacttgagttgaaatcctaactctgccccttgctggctgggtgaccttggccaagttttaaactctttcttatcttcagtttccttattatgacatggtgatgttaatgacaagtctctagacatagtggttaaacttcaacttgaacccaaatttttctggctctaaagcccaggctcttaacatctatcatcctacattaattaaatgagataactgatgtgaaaatgcctgatgtaaatatttgttaaagcaacaacaaaaaatgtcatttgtcaaagtaacaaagtattttttaaagtaacaacaaaagagacagataaccacaaagaaaaggccactttagaaattcctctttgacctattaaagaatgttcaagttcaaaatatgtttgtcattatgattaaaaatccaaccccaaaacttgggtgaagacggcataatctgttagtttggatatatacagactaaggggattctttggaataccctttgtctagagtgatcttatgacatggtacggataactagactcacctaacattcaaatgaagggctgtgtgtcttctatactttgtagacagaggtggcagatcatctgcttttaaatatagagggctcccattctgctaggatccagagggaatgagggtcctatgttacagatgtccctctgcctgcacaaaaggctgaagaacaagccatcatggagtgtgggagatccagctgttgtccatttccagaagaggagtgaatagtggcttaacagagaggacccttgcctggttctctttggaaatttcacagtagtgaggccaggtgcggtggctcatacctgtaattctggcactctgggaggctgaggcaggtggatcacttgaggtcaggagttcaagactagcctggccaacatggtcaaaccccgtctctactaaaaatacaaaaattagccgggcgtggtggcgtgcacttgtaagcccagctactagggaggctgaggcaagagaattgcttgaacccaggaggcagaggttgcagtgagccaagattgtgccactgcactccagcctgggcaacacagcgagactctgtctcaaactaacaaacaaaaaatttcacagtcgttatgaacagataatatgctcaggtattagccatttcattgcattgttttgacaagtgacaggaattaggtttgctaatgttggaagaaaaatctcacttgttgcttttaacttaaaccttttatggttttgagataggtttattcactgggctggagaatgaaggatttatctgtattagtcggatttgatcagttttcaagtagctactcagtgtcaggcctatacattatctcgtttaactctcttaacaccatggtaaggttgactgtatcataatctccatttatcagataaggaaacaaagattcagagaagtcaccaagttgagatcattgcccagctgcacacagctagtgagtggtgaagctgagacacaaatcagggcttccgacgccactttctattacactttactatgctgtgcattcgtgtaaaagcatgatatttttaaagtggcattccagctgccagaaggatatcaaatcaagtactaaagacaatattattagaaatggaaatctggactcaccaagaaatgtcttcagttctatataataggaagactggtattttgcttgatatgggtgtttcaatatcatctgctcctaaaatgcagtctagacacctcttgtgacctgctcaggtgatactaatgaagtttgggtcatttttagcatctacagagaacagagtaagagtgctgtgtgttcaatactattgcagacttatgggataaactggattttcttgctttactttataaagctaatgcctgattacaaatataagtttaaaacaaacctcaaaatttcttggcacccactctttgtggttggtaacatggacatctgtataaaatacccaagaccttcatagagcaaaagtgagtgggaaattaatttttattgggtatataatcatcactagccatgttcaaatactttttctctaaatcctttacaaagatcttgtaagttgggtattattacattcagtttagactaaacgaaatgcaaaaaaaaaaaataataaagaaaatagactcacaaggtaaagttgcatacttgagacataacaaaattaaatttcattctatgatgctgccacatagcagatgatacaagcagtatagaatacccataaacattatgttttaaggtatttccacctgtatctttcttggggcaggtaaatgaaactcactataaaccagttacaggtcctcctttatctgaggttttgctttctgaagtttcagttacctgcagtcaaccatggtctaaaaatattaaatgaaaaattccagaaataaacagtttattacgttttaaaatggatgtccttctgagttgtgtgatgaaatctcatgccatcctgctccatccctccagggatgtgagtcatccctttgtctagtgtatccatgctgtctgcccttagtcagccttcttggttgtcagattgattggtacaatggacacaaggtattaccgtgcttgtgtctaagtaacctgtgttttactattattacagtctattgttatagtttctattttaatataagttattgttggtaatctcttactgtgcttagctgataaattaaactttattatagatatctatctatatctatcacagatatatctatagatacgtacctgcgatatgtatctatatgcgatatgtatagatacatatcacaggtatgtatctatagatacatcggtatatatatgaaaaaacagtacatatagggtttggtactaaccacagtttcaggcatccactgggtggggatgcgggtcttaaaacacaacccttgtggataagagaggactactatatggaaagtcagagttagagagcttttgtaggttatgtagttcaatcttttgttttgctggtaaggagaagaatacaccttaattttgacttcttaactcgaaaagttaagaaacttgtctaaggtcacagagctagtggcagagcaagccaagcatcagtgtctccaaaatccagctcagtgttgtttgtgttatatcagaatgagtaagagttaagataagaacatgagtcttacagctccactatccatgttcaaattcttgctgaatgattggggaaacttacccaacctctctggacctcaggttattcacaagtaatacgaatataacagtatttgatagagccaattaaatgagttaatatttgcaaaatgctgaaatcagtgcttgccccataatgaatactcaataggtatttagatatttttattcttatctttcctcccaagcccaacctagtgtagaaacttctggaatggttgaattgaaggagaaatagtataaacagtataaaaaggtaaactttttaaaaagagaatcatgaagtagtgcttctacagagattgggggatggcaaacaacccatggagtaaattcacaagacttgacacttaagaatccaagagggctgcatgagatgagtccaggtaggcctcgtagacaaatcttagatggagttaactcaggaagccaaggagtatgagccagtagtcatcctgagcaaggataataatttttctttctgcctgccttcttgccttcttgtctccttgcctaccttccttcctttcttccagctttccctccctcttttccttccttccctatctccatccctcccttcctttcctacctccctcccttctttcttcttccctttcctccttctttccttccttcatttcttccttctttcctttcttcctccctctctcctacccttcttccttgcttccttcctccctccctcccctcccttccttccttttccttccttcctttccttccctccttcttcctccctctctccctccttccctacttccctccctcctactttcttctgtttcctctttccttcctctcttcttctttcctccctctcttccttccctccctcccaccttcctccctttcctcttccttcctctttcttccttctttccttcctccctcccatctccttccttccttccttctttctttccttcattcctccctccctcccttccttttttctctacctccctccctccttccttcttccttttcctccttctttcctttcctttctccttccttccctccctcccttcctgccttccacccttcctaccttcctgccttcctgcctgacttcctttcttccctcccccttccttctttcttgccttcctgccttgcagtcaccgaatgttttttgagtgactatgatgtgccaagacccggtataagggtgcacgaaataaagtctctaccctcaggagcttacttcctagtgggggagacagattataaacaaagacacaaataggtaatatactattatgtggtgaaaaatgctacgaagggaaagtcacagggagcatttttgtttggtttttttttgttgttttatatagaatggtcacaggtgcctctctgaggagcccttggagcagacacctgaatgaagtgaagccacatgcctggagaacaaatattcagactgagataagagtgaacacacacctgcagtgagagagagagagagttgggtgtgatttgcagacctgtaggaaggccagtgtggttgggcagagggagcagggaatgtaggcaggggccagatcacccagtatttgtaaactgaggcatggactgaatgatagggcggcttcattcatccaccaaaccacgtgctgagtaatctaccccaattccaaagcatgaacttgacaactgcttcttcatagtaatagatgaaggataaaaaaatttaaaaagcatatagatgagccaacttttatgtgcttaaagtgaaaacaatcatgtctataagacaaaagaaggaaagacatttgacatgctccatgtacctgagattcatctcgtgttaataaaatgttgaacatattacactattggccggtgtttagtttcagctgaggaactaattcctaaagctgcagcctgggggatggggagatagggtggacactgagacagggcatggaggaattcagatggtatttaccccagaaatatttactgaaattgggaatgctgagtcaagcctagccatgctagagggccttgggaaggcagttactagaatctccttgatttttttccaatttcagaagaagcaacaagaagaaagtgtcttgactaatccttctagtgaaagatattcacttttataataaggtgcttgtctacacagaggtttctgagtcaaaggaggagaacgtacaaaatagaccgaaagaagagcctgcctagctgctctttttcttttgtaattaccaagatcccgacggtttatacccactcaactgcaggtgctgggagaggagaggctactgtgacaaaaattatataaagaagagcccagcagatgcatttccagataaacaatgtaaaacatagtctatgtaagtgccataaaatttcactaataaaaaacacacatggctcagggaaacatttattatcaaaatggaagcaggaaagggcatatgctaagtcttattcatttcaataaatagcagaacgtgaattgataaaagttcttaattgaaaaacagttgctcatttgtagtttgatatttaaaagctttctaaacatgtatttattttgttttgccttgaagtaattagctattagactaactattttcttttcatgtcaggtacacagtggctccaaagtcaaaacaaggttagattggaaggaagcaaacaatgaaattgaagggaaatatcgacacttctcaatcaatgaaaatgcatcagcatgtatgagcatctttagctggcaataatacatcagaaataaataatgttagcaaaagagacagcatcattggctattcatagtatgtattcacggttgtacaataaaattctaaaggctgaggttgaaagtgaataaaaattattagttctaaacacttgaaaattccagcagcttagacatatttttgtatgctttcagtgccccaaatgtaaaacttaaatcattttatgaaaaaaccttgttcaatcttttaagaaatttgcatttcattgcaaagatggaacatagcatccttggctgagttattttctatagaagtcagtgccattttgtggtatatgattagcacattctaaaggcaaagattccagaacgtttaaatttagttgtgaaaaactgaaggcatttatccattcatatataagcatgaaaatgcaagcttcactttctcagtatgtttaaatgccacatattataatgggaattctagaagatgtgatcatcaaactctgatttcacgcttagaaatcaaataaaaaagagactggcctataattagaaaattagtcaagtcagatctaatatcaacacatggttgtcacagaacaaaaaatttttgctttgagaaaaatgagatatcattctggatgaatattctgggtcagtagaaaatagggaatcaaagtatagaaataaagtgtttatgtcactgtaaaacttctagttttctaaaataaaatttaaatatctgaaatagcagtttatacttcatactcatacagtcaatagacattggtagcttaagaaagaacttggtaagtgatgatttaaagagtgatatagattcagtagtattcaatatacagttgtaattgatgagctcatcaaactatggaatttgggatatttacataatatttacattatataatatgggagagatagcaagtatctataaagagtttaaattcccatactaggaaatgtatagtttgttttaatctatgtctacatttaaagtagatttttttttcagagacagcatatagttgggtattgctttttaaatttttaaatctaatctttgtcttttaaattatatttaacgtagttgttgatatggttgaatttatgtctattaccttgctacttgttttctatttatcccatttattcttgtttttttccctcaatgtctgccttcttttggattatttgttttagtattccattttatttccattagtggtttattagttatacctccttttaaatttatttacctaattttagttggtgccacaaggcttaaagtataaatctgtagtttatttttggaggatctttgccccacagattccagtcttaccatgctatttattttttagcgatttgattacgctctggtcaatatgtgattatgtgcaaactgtgtgtgtgtgcgtgtgtgtgtttatcttgcttgaggtttgttgaatttcttggatctgtgggcttagagtactcacataaaacttaaaataaatttctatattcttttttctggtatactgtctatgcactcttaattcatatagtcatgtttttatgtcagatattccattttttgtctttaaataatataccaattaatgtataacgtgatccttacaatagttatacttctatttccccatttttcctgctattgtgataatacattttacttctatatatgacaaaaaaccccatgatatacataacagtgtatataataataacatatttttgctttaaatagctaagtcttttaaataaatttttaaaacgagggccgggcgcggtggctcacacctgtaatcccagcattttgggaggccgagacaggcagatcatgaggtcaggagattgagaacatcctggctaacacggtgaaacccatctctactaaaaatgcaaaaaattagccaggcgtggtggcgggcgcctgtagtcccagctactcgggaggctgaggcaggagaatggcgtgaacccgggaggcggagcttgcagtgagctgagattgcgccactgcactctagcctgggcaacagagcgagactctgtctcaaaaaaaagaaatttttttttaaatgagaaaaagtattttatatttatccataaatttaccacttacatcacttcatttctttgtgtagacctgagtttttatgtggtatcattttctattttttaattaattaatttttttttgagatggagtctcgctctgtcgcccaggctggagtgcagtggcgcaatcttggctcactgcaacccccgcctcccgggttcaagcaattctcctgcctcagcctcccaagaagctgggactacaggtgcatgccaccatgcccagctaattttttttttgtatttttagtagagacggggtttcaccatgttagccaggatggtctcgatctcctgaactcgtgatccacccgcctcggcctcccaaagtgctgggattacaggcgtgagccactgcgcccagctatctttctctggttttcatagtttatggcaagaaacctgcagaatttcttacctttgttactttgtgaagtgtcttttttctctggatgcttttagattttttttttttagcaatttaattatgctgtggttaatatgtgtaattatgtgtaagctgcatatgtgtgtatgtgtgtgcgtgcgcttatcttgcttgaggtttgttgaatttcttggatctgtgggtttgtagtcacaccaaatttacataatttggtagccattatttcttgagatattatcccccatccattttttaatgtgtccttttttcccccaaatatacatgttagactgcttgatattattccacaggtcacttaggctctgctaattttttcactactctttttttctacatacttcattttggatgattctcttactatgtcttcaagttcatgggctttttcttttaatccaaatggtcacattttcatgtcagatattcttaatccaaatagtcacgttttcatgtcagatattctgttttatttttgtctgtagaaatcacatttgggctttaaaaaatatcctcaatttctctcctcatttcatgttttcctttaaatacttgcaaataggtttttttgtttgtttgtttgttttgagacggagtctcgctctgtcccccaggctggagtgcagtggcgcaatctcggctcactgcaagctccgcctcccaggtacccgccattctcctacctcagcctcccgagtagctgggactacaggcacccgccaccacgcccagctaatttttcattttcgtatttttagtagagacggggtttcaccgtgttagccaggatggtctagatctcctgacctcgtgatctgcccgcctcggcctcccgaagtgctgggattacaggtgtgagccaccgcgcccggccgcacataggtattttaacattcttgtatgctagttccattatctctgtcatttctgaatctatttctatttaatgcttttttcctcctcataatatgtcacattttcttgtatcttgtctagtaatttttgatagaatgctgaagattataaatgccaggtcatctggattttgacttccttaaaaaatattaattttggttttggcaggaagccaaacaaaaatccagatctaaagtccaagtttctagatatttgcccctcagcttctagcctgagcctctccaaactccagtctctgtcttctgagtcagccaggaagtaaatccaagctgttttgggttacccttccctctgcttatggaccataaattgcctcctggaagaaacctggggcaattgtagaaatcactttttttgtcttcttcctctcagagatcacagccctaagctgcctacaatctgatgtttgaaaacagctgcaccatatattttgttcagttaaattttttttttttaggccaggcatggtggctcatatctgtaatcccagcactttgggaggctgaggagggaggactgcttgagctcaggagtttgagaccagcctaggcaacatagtgagactctgtctctactaaaaataaaaaaaattagctgggcatggtggcacatgcctgtggtcccagctactcaggagccatctcaccgcagcctcgaattcctggcctcaagcgatcctcccacctcagcctcctaaagtgctgggattacaggcaaacaccactatgcccggctattgttcagtttttttttcttttgttttttgttgtttgcttttgcttttttgaggcagagtctcactctgtcgcccaggctggagtgcaatggcacgatgtcagctcactgcaacatccgcctcctgggttcaagggattctgctgcctcagcctcccgagtagctgcaactacaggcgcataccaccacgcctggctcatttttgtatttttagtggagacggggtttcaccatgttggccaggctggtctcaaactcctgacctcaggtgacccacccgccttggcctcccaaagtgctgggattacaggcgtgagccactgtgcccagcatattgttcagtttttaatgggaggttagggacaaattttgatactccattaacagcccaaagcctatttcccaaatctgttttagatacccttagatgaaataattcttacagaaaccatgagaccttaaatgattaatcataattatcaaagaaaactcctgagcagttaatgtcaaatgtaatatgatgtaagtaagttgattgataatattcgtgtcttgttaaaagaggctactttagtctgctgagatactgaacggattttcctaagggaaggagtatctgatatgaaataccagttaatcatcagtcaccaaccattaattaaatggctactttataaaggacattaaactgagcgctagatggagtatgttgttgcagtcatttcatagaaaagtctacaggggtaattataagaaaaagaaattgggtatttcaaagatctagtcactgatataagtggaatgtgatatcaaatgtgaatcaatactttaaaataatttttattaaatgcttattagatacagaagaatgctataaaaatatatgtaaacttaaaagtagtgcttctgaaactttaatgtgcaaacaaatcacctgagatcttgttaagatgcagattctgattcaggagtctggggtggggcctacctctgtagttctaaaaaaaaaaaatccaggtgaggacaatgtttctgctctgcagactatctttggagtagcaagagtaagagaagtgaaactacaatgatcatctgtgtgcccaccactggtgtaagaaaaataactttatttttatctctaatgtcttctgggtaccccctcctgatcccttccctccctcttagaaatgactacttccctccctcttagaaatgactactctcttgaattttgtttttatcatccttttgcttttcttaaaagttttaacacatttgcttgtcacttcaatatatattgttagggtttgcatatttttgaatgcatgaacctaatataaatggaatcatttgcatatatccttcttcaatttttcataccacattatgttcctgaggttaattcatatcattgtaatcatagtttgtataaacttaatttattttcatcactgtatggaattctattgtatgaatatacataattcattttaccgttgttgaattttgaaatttaggttttatactgccatgaaaattcttgcataagttcctggtgcacacatgcaacacttagtcagattatatacataggtgatgaattgctggctcataaggtatacacattttaaactttagtagattatgccaaattgttttctagagtggttatattgacttgttctgccaccaactgtgtgtacaaatgttctggttgttcctcatctgtattagttttatattgctgcacagcaaattgtcacaaatttactggcttaaaacaatatccacatattagatcatagctctataggtcagaaatccaggtgggcctggatgggttctctacttggggtctcaccagtctaaaatcaaagtttcagctgggctgactcttatctagaggcgctgtggaaaaatctgcttccaggctttttcaggctgttggaaacattcagttattggcagttacagactgaagccccttttcctgctgtctgttagctgctaaggaccactctcagctcctggaggccactctcagatccttgtcccatagccccctccacttatcaatggagaccctcctttgcatcaaattcctctcatgcttaaaatctctctgagttggataaaagtcaatatataaagagctaatgtgattagattaagcatatccaggcaatctcccttttgtcatataatgcaccatagtcacaagaataattccagcgattaaagttatgagggtcatctatagaattctgcctactctagtttactgatagccagactggccccatgattcactactgtttcataggtaaaatatattcaccacttcccaaggttcctagtgctttgattccattacagcatcagttcaaagtctaaaatctcaataaatcatctgaataatctaaaccagatggaatataaaaaggagtcagcaatccaaagcagtgttgaaatccagtggagcaaaactggttgggaaaactccactgagtttcaaggcctgggaataattctctttagctctcagctcctccctctccacttttggtttcaccctctgagtcaactttcttttttcataaagagtagatgaatagttttatctccctgcttctcgcagtagaatttgagcagatgtaagagtctcttttcattttatactctctctgtcccttttggtccagctggtagtatttctgctgatacaattttctcaagaactttctggatctcctgtggatatcacagtgattcactgcatcatacagaacacatgctgacaagtcttttgagataatcccttctctatttttggcttctactgaaatggttgagggacagaacccttaagcccagaggtcctctggtttaactgagaagatctgtgagaaacacccttaatctcctggaagggtagtttgtgtggtaaaatactctggccttttgatatttctgagttttcaacaaagaactgtatagtatacactcagacttttctttatgccactgttttagcagccatttatgacttttagcatccttttgccatctggagaggctgtgaattttctaaattatctactctggtttctgtttaaaagttcttccctcaatttatctctctcctttcacaatttactataagcaacaaggagaaatcaggctgtagctttaacacctttcttggaaatctccttagctatatattaaagttcattgtttacaaattctgctttccacataactgcaagatgcaactttgctagctatttggccactacataacaagactctcccttcctgcatttctaataatatgtttctcacttctttcttagtccgcactgacagcattctcaaagcccagatttttttaacctatttccttatattttaatgggttttctgtggctcatggtggctcatgcctgtaataccagcactttaggaggctgagtcaggaggactgcttgaacccaggagtttaagaccagcctgggcaacatagtgagaccccaacactgcaaaaaattaaaaaaattagctgggcatggtggtgtgtgcctatagtctcagctacctgggaggctgaggtagaaggattgcttgagcttgggaggtcaaggctgcagtgaactatgattgtgccactgtacttcaacctgggtgacaaagtgagactgtctcaatcaatcaatgaatagataaacaaaaaatgaatggaagttcttgtagacaaatatatgtggtttggcttttatttatccaatatgacaagccctaaattttattttatttattattttattttgagacagtctcactctgttgcccaggttggaatgcagtggtgacatcgtggctcactgcagcctcaacctcttgggctcaagtggtcttcccacctcagcttcctaaatagctggaactacagttatgtaccactgctcctggctaattaaaaaatttttttttgcagagaagagatcttgctatattgaccatactgaagccttgctttttaagatgatatttagatcatttacatttaatgtaattatcaatatttttagtttagtttcccaactttctatgtctttttatccaatttattttctcttcttttccttattcctgcgttttttgataagtatttttatgattacattttatttttcaggattggattattagttacacatttttgttttattatttttagtggttgctctagggtttacattattcatcttaacaaataacaccctacttcaaataatataataatatatattatttcacatatagtataaaactcataacttccattttcctcttttatcctttgaatgatactattgtctttcattttacttctaagatgttgtaaacctctcaacaaattgtttacatattttctttagacattcaattatcttttaaaatctttaaaaataagtaagaaaacatgtctcatatttatctacacttttaacatttccagtgctcctcatttctttgtgtaaatcccaatttctatgtagtgtcatttgtactgcctgaagaattccctctaatgtttcatttagcacagatctgccatcaattcatgttctctgcttttgtttgtctgaaaaagccttttttccttcagctctgagatattttttgctggttatagaattcagagttgacagttcttttttcttttagcactttaaaatgctattccattgttttttggcttacttatttttaacaagaagtttgtaataattcttttgttgttctgtgtataatatttctatttttttggctgtatgaaagattttctctttatctttggttttaagcaatttgtctatgatatgtcaaacagtgtttttaaaatattaattctgcttggtgttctctgtggtctgttatctttattaattttagaaattctcagtcattacctgttcaggcatttcttctgtgcatttctctctctttcctttttctacatgttaaaccaggtgatattttaccacagcttgtggatgctctgctcttgtttttctcattttttgtctctttgtattttagtttagataatttttattgtcttatcttcaagtcctctgacatattcttcttctgtgttcaagctgataatgagcccatcaaaggaattcttcatctctgatatattcttccttcatagcattcccattggacttttaatgactttctctctactgaaatttcccaacttttaatgtttgttgtgtatctcttctactggatcttttgttttgttttgtttttggagacagggtcttgctctgtcacccagcctggagtgcagtgatataatcatgggtcactgcagccttgacctaccaggctcaagctatccttccacttcagcctcttgaatagctgggactacaggtgtgtatcaccacacctggatttttattttattttatttttgtagagacagggccttgttatgttgcacagactgttcttgatctcctgggctcaagtgatcctcctgccttggcctccgaaagtgcttagattataggcatgagccaccatggctggctgaccttttaagactagagtcatagttattttgaagcccatgtctaatatttttacctgggccattcttaagtataatttttttgatgtttttatcctttgaaatgagtaattttgttcttgctttttgggctgtatcatattttttattgaattccagaattggtataaaagtatagtagaatgcgatttaaatagtattttcattaaaaatggatacacatgtttttgtgtcaagtaaacattcagaatcttaaagaaaaattgattaatttattctcagaaatgtgatatatagcatacaagataagaagtttgagcaataaataggtcaaaattgtgctgatgaacttcattaaaattttaacttcattaaaaattaaaattttaacttccttaaaaattaaaaataaaatatgtaattcaggaacatatatttctaaagtatcccattatactgaatattttagagtaacagttacaatggtatgtacatggcaagtaaaacagattttgaccttttcttgcaatagtagcaaaataataacaacaacaacataaaaaatcataatggtaaagtagcttatttacaaagtgaccaggagtaacattttatacccactctcacatgtaaagtgataagtggtacagaaaatgtattcagtgggaaatgtgggagagggtactccagagatagcagggagttataatggtctaggtctggacaatcacagcatcatatccctggattataatgattgatttgggaccggtcacagaactcaaacaaagactattagctctaacaagagctgttttgggaccctttgcagttagaactaaagttgtaaaaagataagactagattgacttggtgccattatgtcaccccaaagggtgagcctgaattaaaacagccaaaacacagaaaaatggagtgatggacagcaataagtttctgataatattatttaagtctttggattgagctatgcctaaagatctttttcagttataagaaccagcaaatgattttttcctatttttaaatgtaatttaattatttatctatgtttaaatcaacagataaaattgtatgtatttattgcatgcaacatgatgttttgaagcatgtatacattgtgaaatgactaagtataattaacatgtgcattatctcacagttatttttgtggtgagaacactttacttatactttcagcattttataagaatacaatatattaactatagtcaccacgttgtacaagggatctcttaaacttattcctcctatctaactgaaaatttgttatcttttgatcaacatctccccaattccctccttgcaatcaccttatcccctagtaatcaccattctactctctacttctatgagatcaacttttttagattccatatggtgagatcatgcagtatttatctttctgtgcctttcttaattcacttaacataatgtccttgaggtttatccatgctgttgcaaatgacaggatttcccttatttttttatggacaaatagtactccattgtgtatatgtaacatttttcttatccattcatccatgatgaacacttaggttgattccatatcttggtgattgtgaatactgctgcaatgaacaccaaagtgcagatatctgttttagatgctgattttatttcctttggatattatctcagtggtgggattattagatcacatggtacttatatttttaattttttgagaaacctccatactgttttccatggctgtattaatttacattctctccaacagtgtacagggttctcttttctccaaatcctcactaacacttgctatcttttgtctttttgataatagccattctaacaggtatgaagtgatatctccttatggttttgatttgaatttccctgatgattagtgatgttgagcaccttttcatatacttcttggccattttgtatatgttctttggagaaatgtcaattcagatcctttgcctatttttaaattggggctttgctgtgtttttgttttgctattgagttaactgaattccttatatgttttggaatattaactccttatcagatgtatagtttgcaaatattttctcacactctgtaggttgtcttttcactctgttgattttttcctttgatttgcagctgctttgtagtttgatataatcccagttatctatcttgcctttgttgcctgggcttttggttcatgttaaaaaaaataattgcctagaccaatgtcatggagctttctcctatgttttcttctagaagtttcatagttttgggtctaacatttatggctttcatccattttgagttgatttttatatatggtaggagataaggatccaatttcattcttctgcatttggatatccagttttcccaacaccatttattgaagagactgtcctttcctcagtgtgccttcttggtacctttgtgaaaaatcagctgactgtaaatgtgttaatttatttctgtgtactttattttgttccattggtttacgtgtctatttttatgccagtaccaggctgttttggttactgttattttgtagtatattttgaaatcaggtagtatgatggctccaaatttgtttgcttgtttgttttgctcatgattgctttgtctatttgggaccttttttgatttcatatcaattttaggattgttttttctgtttctgtgaagaatgagccaggcacggtggcttgctcctgtagtcccagcactttgggaggccaaggtgggaggatcatttgaacccaggattttgaaaaattagctgggtgcaatggcatgtagctgtcattcaggctgctcgggaggctgaggcaggaggatcctttgagcccaggagttcaagacagcagtgagctatgattgtgccactgcattgcagcctaggtgacaaaacaagaccccatctcttaagaaaggaagaaggaaagaaagaaagaaagagaaagaaagagaaagaaggaaaagaaggaaagaaaataaaaaaaagaaaggagggagggaggaaggagacagagaaaggaagaaagaaagaaagaaaaagaaagaaaaacagaaagaaaaagaaagaaagtcattggtattttggtagagattgcattgaatgtatagattgctttggataatgtggacattttaacaatattaattcttccaatccatgtgcatgagatctctttctatttgtgtcttcttcaatttctttcatcagtgttttatggtttttggtgcagagatcttttacctccttggttaaatttatttctaaatattttttgtagctattgtaattaggattattttcctaatttcctcttcagatagcttgctttttgggtacggaaacgctactgattttttttttcccaacaaatgatttttaacttagacaaatttacactgggttttatctcctttcaaaaaaatgaggctgatggaaaattcaagagtcaatgttttttttctaagagagaaacagaaaaataaataacctggcattagggtgtagtatggcctggagaaaagagatgctggagatcagcacagcagcaagagtcaggatgataaagagagagagagagagaaaaaaaaaaaaacactaagtaaccaaagataaagtactgagtgggaaaatattacttccaataagggaatctgatccagcacaaagtctgggctctggaggaaagaggcatgagaaagaaaaatataggatagctctttttaagtcaaagacatgaactgtttactccaaattagggcagtgaagacctgagttgcagactgtctggtgatatcttgcctttctgttaggtaagcactagggtggctgagctgagctgctgcaaatgtgacataaccggtttgggactatggtgtgcacctgcttgcgctatatgcatggcatgacccaattgagattatggtgtctttagttggcttgtcctagtggcagcaggtgaggtatccagatctgcacctgaaccgaggtatttgaataagtgatagaggagcaattcaaaaggcttttctgaaagtaagtcagtgagactggttgtgtgatggatgagggacctcaggaagagagaggagtaaatactgatgccaaggatgctagcttggactctggatgaacactgacatgtgtgactttgagtttaacaattgctaaactgtgatcaaaattatgggaggcattacactgaaaggcaaaactcaaagaaaactctaatatagtattagttgaaaagtaaatgggggtaccatgaagataactaaagccatatttggtatacatttaaaatgctagaatatgtcctttggatgtgctgtttgcatatagggtacacagaaggggacttttatcttgttaggttttatttcagatatataatggctctttttgttcccagtgaatttgggatgttctatgtgttgcttaatagtaaaatatttaaatgttaaattattagtatgcaatatgtgttagtataaatcaagtactttcattgaatctctgaagataaatacaaccatgtaatgtttaattttgactgtcttgcaaacgacctgaacatcaattaacaatctaataataatagtaactaacagtttttcatgctcaggcactattctaagtgctacacaatctggtaacctatttaatgttcacaactaccctacgaagcaggtacaattagttctcccatttactgatgaggaaaccaaatcactgggaagttaacttgctgaagtcgcatagctagtaaatagtagaaaccaatattagattctaggcagtctgattccagcgcttaaactcaaacactcatctttactggctacatgttgtatattcacatacacacacacaaaatttaacaaaacacttataaacaaagtactgtgagatctatagataagaacatccagtcttgctgttaggaaatgtggctgggaaaatagaatatttatatgaaaaagataataatagaagacagtgtgtaggaagtgacagatggatggcacagacaaatcactctgcagaggttgtagagaatggggcaggggtaggttacaggacagatggtcttaaactgatggataggacctacctgtaccatctggttcctgcccacctctctaaacttatcttcctgacattcaccaaattctagccacacggaccttctttgtgttcctcaaaatgccacactcttttctgtcccacggcttttacaattgttgtgtcttctgcctggaagactctttctttaaatcttggcaaggctgcctcctttattattcagaagtcagatcattgtgccctctgatatggtttggctctctgttcccatgcaaatctcatctcaaattttaatcccacatgtccagggagggacctgtaatccccatgtgtcaagggagggaggtgattggatcctgggggtgatttccctcatgctgttcttgtgatagtgagttctcctgagatctgatggttttataagtgtttggaagttctttcttcactcttctctgtgctgctgccttgtgaggaaggtgcctgcttccccttcgccttctgctatgattgtaagtttcctgaggtttccccagccatgcagaactgtgagtcaattaaacgtctttcctttataaattacccagtctcaggtagtatcttttagcagtgtgagaatggactactacaccctccttaatgagaacttccttggtgacccaaactgaaatactgcttcactcctaccccagtccactagcctgtttgatttcattcatgacactttccttacctgaaattatctacttgctaacctgcttatggtctgtttctcttcactagaatgaaagctccacgagcaaggatctatgatgcctgtcttgttctcatcttttttattttttccctcaagtagtttctgaagtttctacctcatctacacaatctttctgggctttaaaggctatgagggaatgtccctctttgacttgttttgaagccttgggcctacttatttgtatataagagaatatttttaaatggttctcttctttatatatttaaagcatgaaatgctctgaatatcaatgaacccaatcacatttgggtaatagaaaaggctgttttcttcatagttgattctttttttaaaaatttaatttcttatttatttattttgagagagagtctcattccattgcccaggctgaagtgcagtggcatgatctcagctcactgaaacctccacctcccaggttccagcgattcatacacctcagcctcctgagtagctggtattacagctgcacgccaccatgcctggctaattttttgtatttttagtagtgatggggtttcgctatgttggccaggctggtctccaattcctggcctcaagtgatccgcccgccttggcctcccaaagtgctgggattacaggcctgagccactgtgcccagcctgtagttggttcttttgaaatgttcctctcctttatgggccaagctgatagcatttgctttaccctctccatttcgtatatttatcagccatcaaaggcttttcttattgcttggaacttaattgaatgatgtttttgtttctttaccaacaaatgaacacaagcggctttcgaaaatactccaaaaaacagtgagctgtaggcaagattttattcttcatgtgtgatatattttggtaattaaggagtcaattctttggctaaatgctgaaagaaaaatgatgattattgtgtaggataaagctgtgaattatagaatactttcaactctgtttaaaatctaattaacattaattgttacattaattttccctgtgaaatttactaactgtatacaaaatgatatttaatcttcctaatggaggtctagtgtattcgtttcagtcctattcgtaggaatatgagttgaaatggcaaagttatagttatgttgaaagtaatgaagtaatttttatataaaactaatttattaactatcacattgtaattaattaaaacactcttacttttacacaatgttcctgtttttaaagtacttttgtgtgtgtgtgatatacatatctatatgtacatatatgtggattcccacagcgtcgtatgatacaagcagaaccattaattattatttatccccatacttatgtataatggagtttccatgaggtttaaaaacttcccctgtaacataaggatagtggatcatgaagttcataatttgtgaccttattaagttctaattactagggatacttcttgttttagtttgctagggctgccataacaaagcatcaagatttagtggttaggccaggtgcggtggctcatgcctgtaattccagcactttgggaggctgaggcaggtggatcacctgaggtcaagagctcaataccagcctggcccaacatggtgaaaccccgtctctactaaaaatacaaaaattagttgggcatggtggtgcgtgcctgtaatctcagctactcggaaggctgaggcaggagagaatcgcttgaacccaggaggcggaggttgcagtgagccaagatcgtaccactgcactccatcctgggtaaaagattgagtggcttaagtgatagaagtttcttttctcacagttttgggggttagaagtctaaggtcaaggtgtcggcagggctgactgcttctaaagcctctctccttggtttgcagacggctgccttctccctgtgttttcacacggacttccctctgagcatgtttatgtcccaatttcctctttcttataaggacaccagtcgtgttggattagggcctaccctaatgacctcgcttttgcttaatcacctctttgaagatcccatctccaaatacagtcacattctgaggtactggagattaggacttcaatttatgtattgttggaggataaaattcaaccataacgcttgtgtaaattgtgaagaaaacagtaattaatgtatagcttgttttaaattttctgagtgaatgagttaaagaggctatatgaaatagtaagtgctattttagccaagaaaattatgtctcagcacatgtggtttgtgtttcaaaaatatttcttgagtaaaatgtctgatttatctaatatttttaataatgctataacctttactattttgataatggtagtactacccgacatatattgagtcttaccatgtaccagactgttttaaacatatgccctgtattaacatatttaattattacaagcaacctatggaatactattattgccctaattttaaaaatatggaagctggccaggcatggtggttcacgcctgtaatcccagcactttgggaggccaaggcagatggatcacctgaggtcaggagttcaagaccagcctagccaacatggtgaaaccccatctctactaaaaaaaatttaaaaaattaaaaaaaagagagtaaactctgtgtaagaacgctaaatgacttgtcaaaggttctacggcaattaagtagcagaattggaatgaaacccaggttctcaggctctggaacttttgattagcaggccagtggttctcaatgggtggactctagtttctggctaagatggagtaagaggaaaagatttaccatccaatgtagaacaactaaaaaatgtatctaaatatgtaaaacaatggattgtaagacattggacttcatggaatgaaaggcagtgatccctgcgaggaaccatatagttgccccactttataatcgagagaaagagttcccaggcttgatgctcaggaaggtgatacctgacccctgcagcctgcagttggaacacagcactgagagtccagggagaccaatgcaatcagagtacagggaagaggacaagagtactctgcacagggagcgagaaagagcttcacagacagtcagagggttcccttgaatcatcagaggaaaacagattagtatatacatgtgcagaaactagccatggctggggaaagaactaccgaaggactagagggaacaattgctggaactcatctggggctggaatagttcctgtccccaaatcataactcatgggacattgggtagaatattcagaagaattttgactcggtggggaaaaattagccctacactaaattatgctagttccaccttaccaagcttaaaagaaagacctgaaagggtcaaactgtttccaagttgaagaggaaagggaataaacattcacgaattactgtcatcatcgtgaagggactctggatgtgaatcagtagctacacaagaaccttcagtgtctctgagcatgggaagatgaaaagatttgcttttcatgcaaggaatttaaatttccaatgtcatatatatgaggacaaaatacattagtgtctgagtgttcccagcacttctcctcttcaccccactgaaaagagtctatccacccagattcttcccctccacagctcttcagagagggttctgctggccagattggttcagaaagaaggtattaagaattaccagctgggtgtggtggctcacacctgtaatcccagcactttgggaggtcgaggcaggtggatcacgaggtcaggagatccagaccatcctggttaacatggtgaaaccccatctctactagaaatacaaaaattagctgggcatggtggtgggcgcctgtagtcccagctacttgggaggctgaggcaggagaatggcatgaacccgggaggcggagcttgcagtgagccaagatcccaccactgcactccagcctgggtgacagagcgagactctatctcaaaaaaaaaaaaaaaaaaaaaaaaaaaaagaattaccatgtgaatgatgaacacttcccagtgtttgttgataactgaagtaaagaccttgagatagtgttggaattactgtttggttgctgggtagtatttgtttacctctcacactactttcagatgggctatgttagtcatagctttaaccagattatagatttactgattggatagatgtttactaaaaattaagtgagcaaatgcaaggactagaacaacatagacaatatattctgatttttatttaaaagaaatatgcaaaaaacactataaaattttaccccaaatatacccatcagtataccaaaagtgtaccatgtatgctaacagccatataaaattactaaaaggatatataccaagctattggtaaaaggttatctctttcactggggaccaggattgggcaggtagaaggcagtaggaacatagcaaggagatcctttcactttgtattccgtatattgatgagttgcttgagttaaataaaacaagaattataatttgtcattaaaaaactaaatattaaaaattaccatcttcccagtgtttgcaatttttttttttttttttttgagacaagtcttgctgtcaccaggctggagtgcagtggcgtgatcttggctcactgcactctctgcctcctgggttcaagcggttctcctgcctcagcttcccaagtagctgggactacaggtgtgcccagttaattttttgtatttttagtagagatggggtttcaccatgttggccaggatggtctcgatctcttgacctcgtgatctgcctgcctcggcctctcaaagtgctggaattacaggcatgagccaccgcgcctggcccaggcttcaaaatttttaaacatttaactggaatagtaagtaaccaacaagcacttagaaagtgcctagtgtttatgattcctgccacctcagagagctacatttgtgttcaatcttcggacacttaaatgttttcaatgtatgtaaataattattgttaagattttcctaatttctttgttaaaatggttcatttcaaggttctttagagcttgcatttatttcattttttgtcatgtttcttttctcttagaataaaaaccagcagtcattttaattacccctgataatgttcatgaatactgccttggcctgtcttctggtttggaaccttttcaagggcgaatggatatttgtctggtgttccatgtataacctgtccttgtgccacttttccaatgtggcaggaagggaacaactgtcatctgttctgagaattcagcactgtgtctggcactgtgggaatttacccagactgctttgggggaagacatctgacacttcatgataattgtaattaaccagaaagacactggaattggaggatttgaagggaaatatgacaagggattaagactttgagattacttttggagccagggtgacttaagcacatttaaaaagttaggtttacttatatattattattatattctaaaccataagacattttctaataaggtttctaagaggaacatgtaaacctggatcaaatttaaataaggttactgaaaatattaatgaaaccaatgactgagcattttataaatgagaactgtattgctttaagttggagaaaagctgcaagtaagacaacatatttcttcatttgaaagcttgtgtccttatatgagggacattgacaaatgagtggtgataaaatggtggtctatgtgccataagggcttaggtacataaattaatgttttattaaccataaaaataaggttaaaaggttgaaatgtagccttcatgtgtctatgtaaaaaagaggcagaaaaaaatcctcagcactctagagaagcttagtctctgagcaatcactgcatatactaatatattcacatataatctagaatgaatgttaaataacaaaaatcatgttcgtttttatattttgctttgcctttgggatacgaagtgatggaacgagctcgttaacactgctcatttctggttagaagaacactagaaccacctagtggatttttcatttattgcatgatccctacactttactattgctaaattgttaattgctgagataggccttaaagtaaaatcagtggttataatctctttgtgggtcataatagaaatagtaattgttaatcttcagcagacaaagctgtccctaagtccttgaagggaagtccctgcccaccaaatacttaccaactagcacactgctgcatctagaaaagcacaggcagagttaaacatttggctgctgagatacaccgtgcaactggagctttaaatttcctgtgaaagtcagtgagcaaggtaaactgcagcaattcatctgcattcatggcagagtcaactttcggtgagcaagactagggaactctgcagagcacagccaaggggctacattagcagcttgacctttgtattcaatataaatctgtgggcacacaaactggcgtttctaatcaattttgtttttggagcaaagtagcttatgtggttacagcgtgccctggtcattctgtttcccattgctgaaccaactgggtctccgcatcttggtggtgatgacagatgttacgtatattacattgggatttgggtcagataaatagcaaatattctgggaaaggatactttatgtttttgcaaaaggttataaaataccaaactttagtaaaccctgattctaggccaaaggttaactctttatatctatgatttattaggtatcaaaagaaaaaagtcaggatctaaggggaatggaaaagtttctgctattctaacctaagagctggttgtcttctcctagtaaactaactgttcagcagatgggatgcatcgggctacaaggttggtgctttccagccggcaccgcgtgtgaagggcatgtggttgggctgggctctccaagtctgcatggcttgggttgactataaccaggggaaacacgcagtggctacaactgcttctcctaacaattctcgtttcattctcttctcccacagtgtgaaggaggctaggtggatattctctggggcttgaaatttcacactgcaaattttacgagagtgatgatctcttcctaactctttagaagccaagataggaaaaatttcagtttacaagaataaagcccaatccctcttcttatgttggaatgtccagtaaaatgctaagaaacgggtgggtagaagaagaggaaaggaagaagagaaacagagaggagagtaaggaaaaaatagaaaaggcagaaaaaaataatgtacatgaacaacaacaaaaatagtgacaaacagaatggactatagagataggggagggtagtgaagggcttcagagaagtcaggtgaagggccttcttttcttttctttttctttttcctttttttttttttttttttgagatggagttttgctctgtcatccaggctggagtgcagtggcataatctcagctcactgcaacctctccctccgggttcaagcaattctcttgcctcagcctcctgagtagctgggattacaggtgcccaccaccatgcctggctaatttttgtacttttagtagagacggggtttcaccatgttggccaggctggtctagaactcctggcctcaagtgatcctcctgccttggcctcccaaagtgctgggattacaggcatgagccaccgtgctcggccagggccttcttttttaaagaaaattttattatgctgtgataagaacacaacatgaggtctaccctcttaaaaattgtgtgcataatacaatactgttaactagaggcacaggttgtacagcagatccctagaatttattcatcttgcataactgaaacttcacccctgttgattagcaatttcccatccttgcaccccagtccttggtaaccaccatttattctactctcgcattatgtgaaatggactattctagatacctcctcaaagtgcaatcttgcagtatttgttcttctgtgactggcttatttcacttagcataatgtcatcaagtttcattcctattatatatgtcaacattttcttctttttaaaggctgaggctgagtaatattccgctgtgtgtgtgtgtgtgtgcgcgcgtgcatgtgtgtgtgtatataatattccaatttacgtattcatccattgatgaacattttggttatttccacatcttgttttttttgaatagtgctgcagtgaacagtgggatactaatatttctgagatcctgattttagttttttgtgtttattttttttgagacagggtctcgctctgttgcccgggctggagtggtggcgccatctcggctcactgctgcctcaatctcctgggctcaagtgatcttcccacgtcagtctcctgagtagctgggagtatagaccaccatgctcagctaatttttgtttattttttgtagagacgaggtctcactatgttgcccaggatgatctcaaactcttagactgaagcgatcctcctgtctcagcctcctaaagtgctgggaatataggcatgagccaccatgccaggccccagtttcagttattttagataaataccgaaaagtgggattgttggatcatctggtagttctatgttttcaatatttttaatttttcccagcttttttgaggtataattgacaaaaattgtatatatttgaggtatactatgtgataatttaagttgtgaaatgattaccacaatccagttaattgacacatctgtcatctcacataattaccatttgtgtgtgtgtggtgagaacatacaatatctactttctgagcaaatttcaagcatgcagtatggtattattaaccgtaattatcatgctgtactaatattggatccctagaacttaattcatcttacaacagaaagtttacatcctttgctcaacatctatttctcctacctctggatctctggtaaccaatttctactctctgtttctaagagttcaacttttttagatttcacatataagtagaatcagacagtatttatctttcttcatttggcttatttcttttagcatgatgtccttcagattcatccatgttgttgcaaatggcaggattttcttctttttttaaagactgaataagattttctttttatgcatacatattgtctttatccattcacctgtgatggacacttaggttgtttccataccttgactattacgaataatgctgcaatgaccatggggatacagatatttcttcaagatacttatttactttcctttggatatagacccagaagtgggattgattttattatatagcagtgttgttcttcactttttgaagaactgccatactattttccatagcaacagcaccattttgcattcccacaaacagtatgcaagggttccaatgtctccacaacttcaccaacacttttctcttttcctcggagctttttgtctgttaaaccccagcttcccccagcctgaagcatagttgacaaagattgtatatatttacagcgtacaacatggtgttttgatatatgcatacattgtaaaatgattcaatcaagctaattaacatagccgacacttcatgtacttatctctctttttttttttgtgatgagaacattggctttttgatagccatcctaatagatgtgaggtgatatctcattgtggttttgatttacagtttcctgattaggtgatgttgagcatcttttcacattcatgttggccatttgtatgtcttctttggaaaaatgtcttttcaggtcttgagccccgatttaattaggttattagtatttttgctcttgagttttaagagttccttgtatatttcagaaattaaccccttctccattacatagtttgcaaatgttttctcccattctatggtagtttttttcattctgttgtttcctttgctcacagaagcgttttagtctgatgtagtcccatttgcgtatttatgcttttgtcgctgtgctcttggtgtcatatctatgaaatccttgccaagatcaatgtcatgaagattttcccttatgctttctcccagtggtttcacagtttcaagtcttacatttaagtttttaatctacttggcattgatttttgtgtacagtgtaagatatggatccaaattcattcttttgcagttggagagccagttttctcaacactatttgttaaagaaaccatcttttgcccattgtatattcttggcacccttgtcaaagatcaattgatcatatatacgtgggtctatttctgggctcctgattctgttctattggtctatagtctgtctttatgccaataccaaagtgatttaattatggttgctctgtaatgcattttgaaatcaggaagtgtgatgcctctagctttgttctttctcaaaattattccggctactcaggggcttttgtatttccatataaattttagaattgttttgcctatttctataaaaaatgccatcgagattttaataggaattgcactgaatctatagattactttcggtagtgtggatacttccacaataataagtcttgcaatccatgaaccaggatgaagggcttctatatatagggcatcagttctcaagattggctgctgggcttctcagagcccatgaagataataatgagacactgttagttaattttaatattttaaagtttgatattctatcttttaacgtttacaggaatttgaaattgtatatttatgtgtgtacctatttgtttcatggctctatgaaggcaggaccatgtctcttttactcaccacagaacaactagcaccactgttgtgcagtagagcctgatggttagagctgcacgcatgggcagacctcccggtttgccatcctgctgcgaccactgactaccaatggcacatataccaccaattggctaggctaacaaacattccaagccccattttgccttgttgccttccattatagaggcttgtacaagaaaaaaaaccctacattttactttcccactctcatgctgctgggggatggtcaaaggacacagacttggccaatgaggggttagcagaaagctggcgaaggattctggaaaggctttgaattcctgctgaaaaggaaaaatgcagttgacagatgacactaccctctctcttcttaacttaaacgtggatgtgatgcttggatataggtccgccattctgtgcttctgagggaaagagtcagtcaattctcagagggagcagctctaacaccgtggagccatggaatgaacactaggaacaaatgacctcccagctgattgttatatgagagaaataaatgtccatttgtttcagccactgtacatagggctttctgttctttttcagcaaaacgctcctattacagcagttttgtgacttcaagcaagttactttactctgttttaatgttcccatttaaaaacagggattataccaatatcgtcctcatagggttgtttgaaagactaaatgagataatatacgtaaagagcacagagtaagcactagatagggataaattactatttttattactattttgatgatgggctcttaataagtcttagatgaataagtggagtaggtcaaacccaaagggtatggcttcaacccaaggcaacccaaggcaacccaagataactcatttttttctgtttgagaaaaatgagaaagggtggagaaatgagaggaaggtggggtgcggggaaggaggcagggctaaagtggagccaggtgggtgctgggtgggggggaaaatgccctatgaaaatctcccatggtgaatggtcaatgtgttggggccaacatattggccatgtgtggtccaggcatgccagtatcaacagacactaaataaacattttttttttttggctcattgaataaatgaatgcattgtgagggtgttcattaacaaagaaattgccatctcatccttaaaactgaagagatagaagtgagagggcagaaggtttttctccagtgtcactcgcacacctattataatatttgcctggaattatgtgggtgaagatgcattgctcaataattgcctgtgccctcgcaaggagcagaggagaacatccggtgggagcagaagcagaggcagaaagaacagatttcccacggagtaaaatattctgttctcataaaaagtcccttgctgtaacaaacgagaaaatgaaaaggagagcctgtagaagagaggcagacacctcttaataggcacatctctccaaagtttcccaccaggggccaactgttcattaaacagggaacaaatgcgggagcgtagctgtgatgggctccattccacagcccagtgctgggactgcagtgcgctaggaagggcgtcgctgttgttgctgtggcccggtgtgacagcaggtctggcatgtcagaatcgccctgcacaaatagctcctgtgcagctgctctcacccaaacctgctctgaggaggctcagtgcattctaatccttcctaaaaacatggacagaaagcaatggaaagttgacatgtataaaaggtttagtcatggggtttttaagtggatgcctccatgaaaggatcaactcagatggccacgtttctgaacattatttacatcaaaacctgacataaatgcctcagatctagctattttcttcctctatcctctttttacatgtctccttttccctctcgattgctttagcttgtaacctgcatgcgctttcaaatgtggtaagcaaatagaaagcaagacgccatttgaatagtgaatggacttgtattcctgtttaggaatgtgtagttgcccttgggctttctcagttataagactcataaaataaaaccttaacacagatggaacacacacacacacacgcacatgcaccacttaaagcagatgtgagtcaaaaacatatgctgatgaactcaatttgctgatggcattctgagcagtgagcccactcagtagggctgaagggttggcatagcaactcttcctgggaaaaaatagacagctggaataaaccatgacgatgaaagtcttcttccaatgactgaagaagtagagagaaattgccatctcttctaaccccttcaagcaaagcaccttggttgaggtttatagactaggatcttacaaattagaagttcatgtattttcctaggtcagattctataccttgggttatattccagctaagaaacactttcagataggctgcatggggctgtggggaaagagagagcacaaacctccaaaaagcatggagctttgaccaaagtttatttctgtaacttatcctaaggctatgccgagtgaagacttgtttactctagctgtaacttactccatcacatagcaccattactttgagaaattaacatattcattctcaattatttatcaagtatccagcactagcaatagggacacagtccctgcttttgagggattcatgactaggcagacagcaccctgagtatattaattaagatctgatcccatattagaataatatgcacaagagacttattacctctgtctcctcattcctataaacatttatctgggacctatcttatgtggactgtgctaggtgcaatgccaagggataaagcaagttaaatggcaacagtcctattcgacaggccagggactcaggatcagactcaggaccctttccctcttgttgcaaatcctgctatgtgtgggctcagccccaaactgtctctgaaatctcagaaatgagcaaaggctaaggatgtcaaattggctttgagatatgcctgtagactgataacaatagtgatgatgacgatgatattagttaatacaataaagctaatactgtgctattattaccaggcactgttctaagtactttaaataacttatttcatatactcttctgtcatttagtatgcataccattattctccttcccattatccatatgaggaaagcaaggcactgagttaaaacgactcacctttaactgttcatctatcaggtaagctaaccccggagcctacataaattcttaactattaaataagctatgccacttctcaaccactctgctgaaaactatacaaactgacaggtcctacaattaaaacccaaaatagatataataaagcataaaaaatcagttaggaattttctcttgcttttgctctgctgttattgttgttctccagataagtcccattttaaaatccacagtcaccttaaggatgtgatgtgggagctggagctgtctgcctacccaccagctatttttaaaggaagatgatcaggaactagttatgaaagaatcagattgtttaatctggtaccacagaacttgagaaactatagacttggtaagttggaaaatatgtaggcagaagtgatgtctctatggaaacagatgtgaagattcaagtaaatactaggcctgttggactttttatgaagatagcagaagcttttttccccacttcttcttctataacctgtttattgaggaatctgaccatggtgaggaacaagctagagacatatttttatctctagtcactgcttccaactctgctatgtcgaatctcccaactcttctagacatctctcaatgacatcttggacaggaaccatagtcacttacagtctagtccagccttatagcatatgcaactgcatatccagttcaagattttccattgctccattgatggctacacttattactcaaggatctactgtgggtgtgcttaggggtaactctttcaccttggagagtggtgtgggaatgttcttgttctagtatacttcatcccaaagacccaattcctcctgttttggggactgggagagaagatgagatggcttaatgtctcttggctttctctattgcttttgctgtctctctagcataccctagcgaccactgagactcttgtggggcagagatccacacgttatctatcttagggacatgatgggttcttcgaagtccctcatgagaggcgtgactctggctcaaacatgttcagcccccttcagctgtccaagcccccccaccctctatcagctctaactacactgcttgcatttttctttcctggtgggctgctttactggcatgtggaggagtgctgatatagcaggaagagttttgctacttcttattaagtcctgaaaaggtatctggtgggtgctgtgtttgtaataagatacttagcacctgtttcccctcgagctttgggcctaggtatcagttctcagacaaaaggaaaagtcaatttttataccctattataatgataaactttgattgaaactttggggataagaaagcatcgagatgtttctctctccttctattcctcttttctcctccctccctctctccctccttcctttgctcccttctttccttcctttctttcttccaaatagcaaccatgtaatctaaattatgaatgataaaaaagcctggcaaatcaatgagagaacttagagcaaaggaatttggaatattataagatagggaacaattttagtttcctgagcattttggttgtattaccacctgctccaatcatagactgtactttttcatgcccagaaaagacttctacaacccagccttcatagcaatcagccactcgggactttcttgcagtctgagctcaacctgtcttattttgctctgagttttccagttctgaaggcttgattactggtccaagagtgtcatttaggtagatatgctgaactcacatcatcctcgttacaaattgttatggaaaatcccaaaaatataaaagaaaaaaattttaaaaactagctaagggcactgttcacatgctgcaagatctcacggaggagaagatggaatgagtggaggatacacttgctgtgtgttcatcattgaagaagggaaagagcttgtgaaatgacccctagcagaaactcactggtgctttcaagttcagggtggcagggttgaaggtgagagttagcttcagggaagatggtggagaagaatgtttgctagtatctggaccccaaaggattacacaggatgctggagcctgcatgggctaggaataccattagttcaatcatggtctacacttggcaaggaagatgcattgagaataggtgaagggcatagtcaagaccaatgctaactgtcattccttatggaggaattatggaatctacttcaggctgccatgaaaagcaaagcagagaatctgttgggacaactcgttcagcagcctcagactacagctgcatctttacttatctaggcctctagatcactcagaagtaaaggaaaatttaaacaaatctaaacattctcattctttcactggggtcttcaaagttttgaacacaatctctcagaagaatcaatttctgatacctgaatctttgtaagcacgaacagagagaagggactggacagatgaaaaggatttgtagttcaaagaagagggccattgtggggaactgatgctgagctctcggttctatgccccccagacttccttcttcagttacggtccctgcagaatcagcatccatctgcgactctcctttattcattgaactccttgttttggagaggagaggcatattttctactttatgtagctctccagcccatgatctcctgtggtcaggggctaaggattcctttccctgtttcctagtaatgcataactctatctctccataaggcagggtgggccaggcattcagaaagttggggaagctaggcagaatgtgaaataagtgaagggaattgaagggtgctggaaaacctcccatcaaaatttcctcccccatgttattccaccattaggtaattagctccctggttcttaaaggattacatcacttttctttgttaagagttgagtcatctatgcaaaaaaaaaaaaacaaacaaaaaacccaaaaactgagtgaattaaaaccagaatccttattagttattacctcaggagctttaacagtgtcccacttcaattagagcaaagctcactgggaatgtgtgtaggataaagaagatgttggaggtaatagacattaaggaaggggccaggagcgtggagggaacccaagagacgtgggaggatctcaaaagtgatctttgcctattgccaactgtgactgaggccctggcccatcatttgatgttctctgtcattcttgggagaggcagaggagtgtgatgattaagagcatggactctaaagctagacttctgggttcataaagggtaacagcttagctctgccccttcctaccttggggactttgagcaaataatttaaccgctctgtgcttttttcttcatttataaaacaggagtaatattggtccctgcctcaaagggttgttgtgaggattaaaggagttaacacacataaaatacttagaagagcacatggcatagagtaaatgctagttgttattagtatgctttcaatttcacaaagggacttaaaaggtcagaacccttacttactcctaggaaccactggggaaggagtgaggaccaacatatattgcatatgtatgccccagatactgtatataaaatatctcattgaaacctcacatattgatgaaataggtattacaatatccctattttgcaggtgagaaaactgtgtctcagagggtgagaatctggcccaaggtaatacagctaaaaagtggtaaagttatctatgatatcccacaatgttacttacacagttctctttggaaataaaaatataaacaaatggtacaggcagattaagaacaactccagcattattattattattattattattatttttttttgagacagggtctcactctgttgcccagattggagtgcagtagtgcgatcatggctcactgtagccttagcctccctgggatcaggtgaccctcccactttcaagtagctaggactacaggtgtgagcttttgtttttttttttttttttttttaatagaaacagggtttcaccatattgcccaggctggtcttgaagtcctggcctcaagtgatccacccacctcggcctctcaaagagctgggattacaggctccagcatcaaatgtttacagtagttgtcctcacagaaaatgcatacataactcttatcttcctgactcaatgctcaccttcacctcccaccctgactgcagcctattatccctgcagtcagtggacttttaatccagataccttggctgagcaggctcatagaggaaactggcccacagaaactgtgagaaataaatgtatgttgtttgaagctgctaaatttgtggtaatttgttatacagccataaaaacgaaaagaccaaacagtcatatcctgaatgattaaaaattggttgcataagtaaaagaatgtatttgagttggaagatttggggttttcacatgaaaaaccaagtgtgagtaaaataaccgcagaatagctattttggaattctgatactcaaacacttgctagttgaaggagtgctaagattatggatataacaattgattctagggtttcaaaacttatttcccataacataggaaagctgaaactctggctataaagaaaaggctatttttctttctcttgaaataatttgtactattcattgcactgtcaatagccaagaacatgctagaaattacaacgtgctcgcacatatgggtatttctgctatgatgcaacatatatgtttctaaaattcattttgttttgcaaaatcaaccaatagaaaaacaaaggacttataagaaaaatagggttggggcacaatagtcacaaactgtcagtaacacaaaacaaaaagataaaatctaatcaaattgtggtagcacagtcttacacaagtcaaatgggtaagaaatatgtaaatactacaaaaataagacactttcctttgacaaagactttacatttgcttgtggaagtgggagtcagagcattgcagcttgtgagtttttgtgaaattgtggaaggaaggtgatttgaaatcaagggaaagttgtatcactgatgtggatggatatggcccatgttgagggtggtggactgaggtagctgacatgtttcaggtacgtgcatgtctgttttgtacatcttacctggctgggttcaggtgtgtgcaattttctgtgtttccctagtgtttttcatagactaaacagtgcataagcaaccccaaattcgtgttatgctcaaaatgttctctaataaaatcttgtgtcttgaaaacaagtgttaaaaagtaaaactgaccagatgttatttcatttgaatcttacgataaaagcaataaatagacatgaggaaacagctttagacatagagctagtaaacagtcaaggcagattgaactgaggtcttcctcctctgtgcttttcccattaggccactccaggaatgtctcagtctagcatattttaaatctgtgtgatgctatagtttcactactgcaatttctaagactttatattttcaattagacatttattttactaccaagaagtatcctgatccagaggtactattctcccagccatggagagttcctccaaaagacaaaattctatctttgctaatgaaaatgcaaataaaactgtatcaagagtttcatgattttactaggtatttcccatcatatgtttatcatacagctcaaaattgatgtcaagttttttactctactcttttctcaagttcattcactataaattgaatttcatttttctgcacttgggttgtattttttgaaccactgactttgcttatattagttttactatgatattcatcaatttgtttaaaaaaattcagaagatacctcttgcacaaattcattttataatttaagaactcacttcagaatgttgagactctgttaagtatcaattctaggattatgaagatcctgtctaccacaaagagccccacaaaggtcttttctccctcattcccaagcagtttaacttaatgaattcttctggtagaactttgtttagacggacttaaagcaggtaagagttctttttaaaatacttgtggagtgcatgagtgtgcaaacaaacttaaaagcacatattggctcaggaaagctgaggggaaatgataattttcaacagtccaaaatagccatcctggggcttacagaaagtaaggtagcaattagcctaactctaagcctaacaataacacagtcattaatcctgggtgcccagacacattccattagaggattttggcaacaaaattttgcttttctaattctgagtagatataaacaataatcccttaatttattagtctgtttatcacacttattaagcatttcctatgtcttaagaactgtgccacaagacaaggatgccctctcttaccactcctattcaacataatatgggaagtagacataaacaataattccttaatttattagtctgtttatcacatttattaagcatttcctatgtcctaagaactgtgccacaagacaaggatgccctctcttaccactcctattcaacataatattggaagttctggacagggcaatcaggcaagaggaagaaataaagcgcatccaaacaggaagagaggaagtcaaactacctttgtttgcagatgacatgactgtatatctagaaaacctcataatctcagtccaaaagcttcttaagctgataaacaacttcagcaaagtctcaggatacgaaatcaatgtgcaaaaatcactagcattcctatacaccaacaacagtcaagctgagagccaaatcatgaactctcattcacgactgccacaaaaagaataaaatacctaggaatacagctatgtagggtggtgaaagatgtctataaggagaactacagacttacaaatcactgcccaaagaaatcagagatgatacaaacaaagggaaaaacaatccatgctcatggataggaagaatcaatattgttaaagtggccatactgtccaaagcaatttatagactcaatactattcctatcaaactaccattgacactcacagaactagaaaaaaactattttaaaattcatatggagccaaaaaaagaaaaaaatccagaatagccaacacaatcttaggcaaaaagaacaaagctggaggcaccatgctacccaatttcaaactatactacagggctacagtaaccaaaacagcatggtagtgacacaaaaacagacacagagaccaatggaacagaacagagaatccagaaataagactgcacacctacaactatctgatcttcgacaaacctgacaaaaacaaacaatggggaaaggattccctattcaataaatggtgctgggataactggctagtcatatgtagaatattgaaactggatcccttccttacacgatatacaaaaactaactcaagatgaattaaatacttaaatgtgaaatcaaaaactacaaaaaccctggaagacaacctaggcaataccattcaggacataggcatgggcaaagatttcatgatgaagatgtcaaaagcaattgcaacaaaagcaaaaattgacaaatggggacaatttaagctaaagagcttatgcacagcaaaagaaactatcaacagagtaaacagataatttacataatggtagaaaattgtgcaaagtatgcatctgacaaacgtctaatatccagcatctataaggaacttaaacaaatttacaagaaaaatacaaacaactccataaaaagtgggcaaaggacatgaacagatacttttcaaaagaagacatatatgtggccaacaatcacatgaaaaaagctcaacatcactgatcattaaagaaattcaaatcaaagccacaataagataccatcttacaccagtctgactcttactataaagttaaaaaataacagatgctggtgaggttgtggagaaaaaggaacacttatacaccgttggtgtgagtataaactagttcagccattgtggaagacactgtggccattcctcaaagacctaaagacagaaataccactcaacccagcaatcccactactggttatatacccaaaggaatataaatcattctattataaagacacgtgcacgttgcatgtgtatgttcattgcagcactattcataatagcaaagacatggaatcaacctaaatgcccatgaatgacagactggataaagaaaatgtggtacatatacaccatggaatattatgcagccatataaaagaatgagatcatgtcctttgcagggacatggatggagctggaggccattatcattagaaaactaacacaggaacggaaaagcaaatacctcatgttctcatttataagtgggaactgaacgatgagaacacatggacacaacacacactggggcctttcggagggcagaggatgggaggagggagaagatcatgaaaaataacttaatgggtattaggcttaatacttgggtgatgaaataatctgtatgataacccccatgacagaggtttacctatgtaacaaactcgcacttgtacccctgagtgtaaaataaaataaaataaaaagaactgggtgccagatgttgaaggaaaatagtaagatcttaagaaaatggctttggccgggagcagtggctcatgcctgtaatcccagcactttgagaggccgaggtgggcggatcaggaggtcaggcgatctagaccatcctggctaacacgatgaaacaccgtctctattaaaaatacaaaaaattagcctggcgtggtggcaggcacctgtagttccagctactcgggaggctgaggcaggagaatggtgtgaacctgggaggtagagcttgcagtgagctgagatcacgccactgcactctagcctgggtgacagagcaagactccatctcaaaccaaaaaacaaaaaacaaacaaaaaaacacagcttcaagtttgtagatctatggtcattcagtctatgacactgaacacttcctttagtagctcacttgttgaataacatctagaattaaataggagaaaaaattttcctaatagaactataccaggctttacatgattggtagtcttcgttcttcacaaaccagtttattttaatagatatctcaggtagagttttatgaaggcctcaaagcaattaaaacttcatttgcaggaaggacaatcttatacttaccagaaaactacagctaacatgaatttctttgttagacatttgctatgaaggatctttgagaaaattctgtgttagaacccatgacacccctaacatagctatgccattatttttttcttcttaaatgaacagatgagttttgtaagcaaagtaggataccatgattgatagacctttttgtaaagtatactcagatttgctgaaagagcctacataattcagtctgggtgcagtggctcatgcctgtaatcccagcactttgggagactgaggtgggtggatcacttgagatcagaagttcgagaccagcctagccagcatggcgaaaccctgcctctactaaaaatacaaaaattaaccaggcgtggtggcacatgcctgtaatttcagctacttgggaggctgaggtaggagacttgcttgaagccgggaggtggaggttgcagtgagccgagatcatgccactgcactccagcctgggtgacagagtgaggctttccctctctcaaacaaacaaacaaacaaaaaaaacaaaaaagaaggagattacataactcaagaaaaccatactcgaagcctctctttttaaataatttttatctcaaataagggaaaaatcaaaatggaaagaggttatgatcagtttcaccattggcctacagtattgcttcagagaacaaaataaaagggttcttgcctctccccttgctggaactgggcctgccccagggacttggctgtagggttgcaggtactttccctgtcctttgatcttaatcaccaagggagcaattaaagttccatgtccaggaatcacttagtaaagagtcttgcttttagttagagagttgaaggggttgtgggcaatatctaaatatgctttggacattgtatttgatggggttgagaaataaaaaaaaaattctaggctcctaactaactgaatggattcccctcttggccaagggtgaaactgcctttgcaaaattattacacaaagagaaatctaacatagttgactccatcttgcttctgacttccaagctgtccttggtcattcctgggtgtaggccaagctcactttgggaggaatttagtttatagttttaccttaaaacaaagatgataatagcccttctcaaaactaaatcacctttgtaaaactaatggaaaggcacaaggttaaaattatgagagaggcccgaattctgataggataggcatagtttttatcagcccttacagatcaggaatcatgtgaccagaggtcacaagatttgtgaccttcccatttactcctatagttaacattgctatgttagaacccaagattgtattttgtgggggatgttttccagactgatcctacctgaacttgtgattcatgactcaattgatcctatggcctcacccagaggtagactcagcatacgaagactgttttccataccagtatgattccatccctaaccaatcagtggcacccattccctagccccctgcccaccaaattgtccacaaaaaccctaagctccaagccttcagggagactgatttgaatgataactccagttctcccacgtgagttagctttatatcaaatgaactctttctccactgcaatactgtggtctcagaggattgatctggtctgtgcagtgtacagtgctgggtgattaccagagaaactcgggaagctgagttcatggccttggcgggatgggaggttgaactagtctcactagtatgtaatcacttgtctcactgctgtcccctccccaccttttttaaaggaaaatgtacaaatagtaaacttcctgagaccctctttggaaaaaacagccatagatgcatctgtgacttatgtttttcctggacatgccctcaagctggctcgataaaccttgatgactgagatttatgactcagtcactcattttgattgtcacagtataaagggcctgctatggtctgcatgtttgtgtctctccaaaattcacatgttgaaatctaatctcaaatgtgtgggcattcagaggtggggcatttacaaagtgatgaggtcatgagggtggagcccttgtgaatggaattaatatccttctaaaagaggcccaagggagcttgtttgccccttctgtcatgtggggacacatagtaggcaccatctacaaggaagggtcctcccccagacacggaaactactgttggtgccctgaccttattaattatgattgagacaatcaaatatggtctggctaagagaagaatagtccataacattttgatgctgactccctaaagtctatgttttgaaatattgaatatttaacatgaagagcaaattacaattaggacgtcttaggtccatacaaagtaatattctatggactgcctttggaattactaggtttggtcttgggatcagattgaatgaactcagtatagattctgtgtcacttctactcatgaaacacatttactgatggttaatctaagagtatctttaggctaggtacagtgcctcacacctgtaatcccagcactttgggaggccaagacaggcagagcacctgaggtcaggagttcaaaccagcctggccaacatggtgaaaccccatctctactaaaaatacagaaattagctggatgtagtagagggcacctgtaatcccagctactcaggaggctgaggcaggagaatcatttgaacccgggaggcagaggttgcagtgaactgagattgcgccactgcagtccagcctgggtaacagagtgagactccatctcaaaacaaaaaaagtatttttatatatggcaacatgttgctatatagttatgaaataaagtgttgacaaaacttgactgaatgtaatcatagtgaagccaacgttatgtgtcatatgtcacctgtgcctgttttgtcacaagtgctctttacaaaccacttagcatcttcactttgaggttgtatgctcttatttaatgctccatagagttttgagattgttgtgagttttctattcaacattggcttctccaaagatttgatcattttttaaaacagctgtaaacctattcaaaatttatataacatatatttaaaatataaggacgctttctgatttcaaatgcatctcatgcagttaataaaattggtaattggtaatttagagtcacagataactctaagtaagtcaattaaaactgtgtaagaatttgaaaagaggatacagggcattgaggggattgacatttggtggccaagtcattatagctattgtttggaagaatctgatgatattcaaatgatcaaagcaagtattttgaagaaataaatgatgtgaaataactgataaagagatactttaaactgacattatcctacacttaaatataataaaaatacacagtaataaagcaaaataacagatttgttgtttggctacaacatcaagtcattctcaactacatattttgacaatagtgactctaaatattttctcaaactaagctttcctaaatattttcccaaaccaagctgtttctttacggactttatatgcattaattttatatgaatgactatttttctaacataaaaacaatctttacaaatattttgagaattcaggaataaaactaaagcattcaaatgaccactgctcagttgtacttgagagattttgcccaaaattatttaaaagtgttgaactgtagaaggccttaaaatagaacttgtagaatttcaatattcagaaagtaaagtttgttactatgggtcatactgttgtgaaaaagcagaaaaagaattcagaataatcaaattgaaactattttgctgatataatcaaatatgcctgatgtttgttgtggttttaaagactgtattttctctttggacatttctccatctttctttttttttttggtgtaaaatatacacaacataaactttccctttttaactacttttaagtgcacagttctgtggcattaagtacatctacactgttatgcaaccatcaccatcatccatctctggcactttttcactattcccagttgaaactgtacccattaaacaccaacttcctatttttcccttcctcagcagtcaccattctactttctgtctctgtagattgactactctaggtaccttgtacaaatggaatcatataatatttgtccttttgtgactggcctatttctctattgttttactaacataaaagtattttatctgttattaattttatctagtcagaaactggaaacactgacagaatctttggctgattaattacactacaattgacaaaatactgcccaaacataagtgatttactaaaatatgggacatgatgtttaaaattaaaaacctgatgaaactgtagtgtcagtctcaattgcagttgtaatatttttcctatagccaatgattaaaatgtgcatttgttagtgattttaaattaatttatattaaatttactattttcccatctaaagcagaattaattggtcatttttttggcacatgaattaaaacatatatacactgtctttggtttgctaaaagaatgaatgaatgatataaaggcatctcatgtagaaagatttgttcttgttaattagcaggtttattagaatatggtttctttcatctgaattttggagattggaaaaacaatctccaaaatataaagaatgcagagaagtgcaggagaagagagaatggtaagctaaaaattaccatcaaatgctaagtgtcagacctacacaaacacaaaatttaacatacttaacagtggcatgttcagtgaatatgagcaggagacatgagctcaaatctaatgatatctatgatgccagaaactttgtatatgctgaatttaatccttatgacaactctctgagtcatataatttccccatttttgcagatgtcaaaactgaaggtaagaaacggtaagaaatttgcctagtctcaacactagtcagtgtcagagccagaattccaattcatgtctacatttccaaagcccatgttgttcccatgacacaaaattgtagcatgccttacacttattgacttgggagagttttttttcttaaaaatatagtatcaatataattttagcaaatcttactgccattagaaattggtaacatttatttgaggatagacttcaaaatctttatgagacataagaaaatgaagttccagaataacaggaatttgaatggtagttttcacctttcagaggatggttttttgggggtggtaagaaacatctaagtattggttctcatttgggggcatgcttagaggcatcagtagtttctggtaaagtaagggtctttcaaaagaaagacaaatgaatgatactgtataggtgcagttacatcataggcaccacaataaggtataaaagtaaagcattatgactttcaccttgggaaagaactttgaaatgaggaaaacaaaattgcccaataaaggtgatattttataaccaaccagtgtggactagtggagcataaagtttctttaaagacacaaaatagctgtagcttggattgcacatgtggatacatcaaaataaatatgtgtcaatcaaaagtaatatatgagagtttctgctttggcacattctaacttggtgttatcaaccatttacatttttcataagctaaatagtacgaaataatctcatacagtggttttaatttacagttttctaatgactagtgatgtggagcatctttttatatgtttatttatcatttgagttttctcttctgtgaactgacagtgcatatgttatgcaaatatccaaccttcaatgtccaattttgaagtcttctaatagatgtgaaatttgtgtatagattcttttgaactctacctagacaacatgggagagacggagatgcttaccaaacccattctcttcttcccaggcacacagttacagcgtgtttccccatctctcagttgttttgccatgtgacggactgaattctagaaaatgtaatgtggacagaaatattgctatacctattccataaaacttcccacaactgaaccttcattgtgttttaccatttaccagctggttggagaggatcaggatctaaagggggtcacaggtgagacgagtaatcatgtgaaaggctgcacaacagagaactcccacattggactataatttgaatgggaaattaatctattgggttaagccactgaaaatttgaagtttatctgccatagcagctaatattgtcattaactaatatacactatgtatcgttgtgaataatgactattttgtttcttcctttacaatctctatactgtttatttcccaggagttgacattttattatgttttgtttctttcttttcacttccccgccgtgtcacctaggaactctagttcaatgttgaataaaaaattttgaaagtggccatctgtgttttgttactgaatttcgagggtatgttgaagtttctcttttaagtggggttttcttttcttttttttagagtcaggggtctctctctgttgtccaggctggagtgcagtggtgtagttatagttcattgcagcctcaaactcctgggctcaagggatcttcctgcctcagcctcctgagtcactgggagtacaggcataagccaccattccttaagtaggtttttcatacataaacttaattaggctaagaaattttccttaaattcctagtttactaagaaaattttactgtaaatctgtattgaattttgtcagatgttcataggcttgtattaacatagtaatacatattttttggcctttaatctgttaatgtaatgaattacataacagacttttccaatgttaaactatcgtacattcctgggataaatccccttctgtttttacatattattgttgtctaatattttatataatagttggccaatataccaatgtttgctatactgcttttatatcactgttattggttatttttttcattcttgatttacatggccaatgttcatttggttttacttacatatttaccagtttctttactcactactgtctctttcttctcactttttcctttgagttcagctttcttatttctgaattacagtcttcacagttcttcagctaatagcaaagttttaaagtctttttctgacaatgccctttttcattcttattcttgaattttagatagctgggtataaatcctttgaagacactgaattctattctgaattgtattgttgttattgaaaggttcttcttcttcctcctcctcctgctcttcctcctcctcctgctcttcctccttctcttaggtaatatctttgtctttgtttcttctttagatattctctttgtctttgatgttctgtgtttcaccaaggatgcactgtgtaatggctctagttgtgagtttctttttatttaccctatttaggattcttgactttaatcaaatcaattaaagtgtacttttctcccattcttttaatattctctatgtggaattcttatgagacatagattaaacattacttctatgtctctttttaacatatctatatacctctctgtgaatatgcacacacatacacacatatataatatatatatttgtatatgaatattacatatattttgtgtatatattatagataaaagtatatatacatgtgtatttatatgcatattgcctgtgtatataaaattaatcatatgtaagtttaatttctatataaattatatataactttaatttatagttaatttaattatataaagattacatatatatatttgttgtgttttgtttttacttgcagtgccgagaattgaggtaatcatgttgctcagttcatggcacactattgttatcagtgggtgtactatttctcccttggttgtttgtttaatcattcctctttattctcatttcccacttatattttccttctcccataggaatctaatgtatttgttagaataagcaacagcacagtaccacagttgtataaattaaaatatatacccactaaagaacattatgtatttttaaagtacctatttctcactttctatattcagcattctgttttaaagatctatatatgttgctgtatatttatctagttcactgcttctaactgctgcatcttaatatataatgtgctgtcattgcatttccctgattcactcttcagtgctggaaactcagggaacttccaacttcctgctgtgcaaacaatgatcaaataaacattcttttacatgggttttatagacccttttgagaatttctctgggatgtattcctaggaattagattgattggtcattggatagacatatttgagccttatcctcttatattttgcatcttttgctgaatttgggatagtttcattaaattgatcttccagtttgtattttatatgttttaaattttctgtatattatgatgttttgacatcttaaaaaaccctttcttgctgtaaagagaccgcccttcctggctctagccaattcttagagatagcaaaggactcagttaggagcgtactttagatttgcaaattaaccaagttgtgtatcttctgtgtggcctgtacacccccagggaaaaatatgcttgtgtcttaatcatcccagggccatgtaccaggcaattagggactatctctatagtttagagcctgcagttattattcaaactaaccaattctaagaagtttatcctgccctccctcacgcttcctgtcccacggaagctccaataaaattctagttttggttttcctcttacttctgtcttctgccacctgaccaaaacctggtgattccccggtaactctgtatggcatgtggtacccccctctctagaacctgtgaaagtaataataaactttgttttcttgtggctttcctgtgtcccctgtgctgcacctgattaaccatcacctaaaagaactcagaatacgattcatacattttctcttcatctgcctctaatatgatatttttaaaatgtaaatgattagaagctctatttgaggataatagattgagaaaatgattgagcagaaaaagtaaatcaaatgagaatactaagacccttcaaaaaagatatggcagaaattcttcatgtgttttacaattttagaatgtaaactcataatttgttttgagttcatttgaaagaatcacatttgtaccagtcatgagttgatcagaaaaacggatcgtcatgaatgaaatagaatagtggatttaattagaccttgtacaattggggaactggttaagaagtccatgtcaggctgttgctttttcatgtggtatttactggacctggggtcactgtagataagctggaaggcaatcaggaatgagagttggatttgaaataggaaagggcaaggacaaactggaacccacaaggtcagacgggaaccccagaagacaaaatggagcccaccaggacaaactggaatttgactctgtctctcatgatctctaacttcaataatgttagtgacctgcagagaagtttgaacccttcatcctgaagttgcacatacacttggcccaggactgaaggaagtcaaagaaggaaatccactggaagctggagaactgtgggtctaggtgcttctcagtgtcaataaggtgggttaatagattagtgacaacatgtgcaaattgccaatgcctggtgtcatatattgagtttcagagtataaaatggtggcttcttcatttgtgcccttcagttcccagaccaatgtgctttatggcctactccaaattgagaaacacacaaagaaataaattctgagaatgtaattccagtttagctaggttgacatagtataaaaccatattacactagtttagttgaaggtatgtatctacggatatattttgtgtttatttcttttaccacccttgaagtatctccagctttggattaattttaatgtaaatttttcattttggagctttctagaccaatagccaaacttaaaatgagttacttgacagtggttctgggttctcaaggaagagtctctatttcgccattctgaacagaggctgagaagacaacttacccagttatttccctatacctatgggcatattagttcacacttacgctgttatttagagtggagtttctctaggttctagactctggtggtctctgttccaactccctataggagtagggacagacgaccttatctcctgcctcacagtggatattaagacatcagcctctagattacctaagacagcccttccccagagtagacaaagagtcagatctgggctttactgctgtgagtttcagttctctattattctctgtcccctgaagagctatttattttccttctagttcagaaatgcattaaaaattaaaaaaaaaaaatctagatttttcagatgtttttagttgacattttcaggctaactactctgccatgttacctgaacagggagtccattgcatttgcaaccaagaacttaaatgcagagacctcttttacaaggatagggtgctttagcaaattcagatttacaggaaagaaaattacaaatatacaaaacagatcaattagagggatgaatttgcataacaaaaggactcgccataggactagttaaaatagctaggatctaacagtgaatttagagcatctaggaaaatgtgcattgtataaatctatcaggcctgtagttaaagaaatgcggggatgaatccttttgtaaagcagaaagtcctttttgtaatgtgaatgagtactctctaatttacaagtctgtaagtttgagaagtttgagtctttgtgtatctggcttctcaaataatagagatccagaataagttatttatacagagagttcaggtttaactctcctgagtatgatttttctatgttaatataaaataatcaaaacaatctgcatatttaaagaatggaatcatgaggtccttcagacgtttaatatgtgcatttctacataatttcccatgggtcttgttactggaaatatgttgaagacaaatgtttccacaaaatgaccgatttcttttgatagatctatttaagcacacagtaaaaaacatcttgaccagaaacataattgctaattcactgtgttggacattagctattgagttattaaccagttatctgagggcctaccatgtgctgatcagagagtcagagttccttagatatcaggtacccaaactcttcattttccagatgaagaaactagtgatgtcaaatgacttgataaacagtttcatggctactcagaggactgcatgaaacttccagcatattatactgctttctttaatagagtgaaagagtccactaaattaaagaggttgtcaactccatggatgagaaatttatgttaaggaaccatgactcaccccgaagggtgccagactgagtctgtggcccagtgcaaagggcacagagacatgccatcagacaggcttgtgcctgcatgtcttgcattgacgttgggcaatttattaacttctctgaactgcagtttccccatatgcaaagcagaaaattaatactcatcctgccatcctgaaaatgtattgttagaaaagaacattattatatgggagatatactttactgtataaactccaaggtactttaaaaatgtcatttgttatgattattgccatagctactctagagaatgcatatatcaaaagatctatgaactttcacaaatatttttgcagaataatcaaggaacaagttgttaacctttttctcagaagcaataaacaagaaaaatctagactagatgtttatacaaaaagttatttacaattcagagctgtgtccaatgtcatttgttatcattattcttatatgagtgaattaaatattttttaaaaaattaatacatggaaagcaatcagaagaatgatttgcacacaacaaaatgtatatgaacattggttattgttaattatatcctcatacttttctattcctcctgcaattgtgcaagccaaactctctcaactctgaattttattttctattgtttgaaatgacaaagatcatgggtagctgataattcaagcattgtttttgctcaatgggaagactaagatgttgctttagggagtaaaagtatggggagacattgtaacaacagctatagtgtcaaaggacagtgtgtttttaaatgtatgtatacattatacatttattcccacttagcttctgttataaaagtcctgagacatcttctgggctttgatctgtttatggatccagatggcagagaggtgatgagaccacaggttagagagaaaatttagtcacaagattggaaattataagccttttactgcttaattattcccttcctgaatttcaggatatggtcacctatgaaggttattttacttcaatcaatccttggatgaagaagacaataaccatagctgtacaaaagaataatgagatttaagtattgcaccgatttttacctacattctctaattgctcattacctaaggcagctcagaaatgacgaactggctcctttttcatggtcaggacagctgcttttatatgttacatacttgtttaatatgaacttcaatggtttttagaagaaggaataattagaacaggtacagccaggggatttttataactcctttaatgaatactaaatagtattttatctttaaaagggaccatggctgcccttaactgcaaccaagttcattaataaaaagttttcatgcagcagacacaaaacaatataaagaaaccagagaaaaatctaaactgagagctgtagttactatctgtgctaagtgaatcaagcctacttgcaaagatgcataattattttttaataaaaaagaaataaaagattttgctggcttaaccaacgataggtaatgatactaaaaatgacatgagagtaggatgctgtatactgattccagctgcttctctttcgagttgggattatctgaattggaaaagaaaatccccatttccccagcaaggtacagattttacaaaacagagatccatccttgacatggtaaatatctaatgaaaccacctcttctttccatttttttcccaccctgagccacatgctgtatattaaataaaggactcaactttgttcgtactggagaagttgtctgggctgctgcaggatggaggtttacctgaggttacctgtatgaagggtgaattgctcacgctttagagcactgttatctttctccccatgtactccttcaacagcacaatctacagtgaagtacttgtcagggtaagcggtgaggaaagtgagagcaggttgatcaataaaacatagactggaggaagcctcttccacaggaaactaacaatgcataagaagcatattcttaacaatgtttggcaggaaactcagcagcatgaaatgtacttaatgtttaacagaagttctggaagaaggcagctttacacgtgacgtaaagaagattgactgaaggcatgctggggtctctatggaaagagatttggatgtgaatagacctgggcttgagccctggctccaccatgttctcaatgtgggaatgtgtgtgagttcctgctcctccccttcctctgctgtaaaatgggaatggtaacacctgccttaccagactataagcaaacagtgatctgagatgtgtgaaagctttgtcaactctaaagcactattaaaatgcttcaggaaagtagagggaatttatcctggtcacctgccttgggaacagtcacgaaaccataatgtgttcccagtcctgacactggcttccctctggctcaaaaactgggtcttgcaatgactggctttcttctgattttcaaggttgagtgactggcagtctgcctgggcacacgtcaaagagcaccaccacatcaactgcatggctgcagtccctgtgcaggcagcttcctttgctccccagcaagtgcaggggctggcagaggctgcttcagccttgtattgtagggggaaataggtgccacatgctgttatgaccatggtgatggtgggggcgactggtgcttctacataccctggttctaagctccttttctggatctttgtagttacacatgggagtcaacagcccactgccttccctttatcctctatctaccccattgccttcttccagcttccccccaacccccacccccgtctaatgaaaaagaagttaaattcctatcttagcatcaaatccagctgtagttttttctcccaactaagcacatgcagtacggtacctcctcctgtaccatatacctcctccagtaagatactcctgatctctttctcctcctctaggctcactttaaggtccttgttgtatgtgaccctatgtataccctgaatgtggttcttattgaactgtactataactgttaacttgctttcaattagaatgcgaactcttcaaaggaaattcttactcaccagttgtctctccatcatctagcatagtgcttggcatacagtaagtagatgtaaatgattatcgaactgaattgatcagaccctaccactcccattgatttaaaattatacatatgcaaagaagggtcattttgagaccacagtgcaatcaagatgaacatgtctctaacttctgacttctctctttctgaatccgtctaccctagctcacccatctgtctctgcaagaagggccaagaagagcacagactcagtcaaacaaagatggaacaaaattggtcacaacttgaactattccttctttattttccatttctgttttgaccctttaaaaggaatttcaaaattttactttcttctggtgctactaacgtaaaatgcctaataatctctacatggatacacgatttgaataattatacacttgatggggttataaggaaagtttggaaatcatcttacaccttctagacatattccaagtcaaattgattaaagaaattagttctttctccttagttctaaatcatatgccaggaattccaggtttgtggatttgtcatttaattgcatattattgataaatagtattaaagacctttcctgaggactcactgttctgagtggtttctatagctctgtgacagatgttaccagttggccagtaaaatccattccaatttcctctctcttgcttgttttctcctgcagagcctggaaaaagctaagacacactttcccagtctcctgcaagttggacggtggctgtgtgacatggtctggccaatgaggtgtaaacctgagtctgctggaaagatactggaagaacttttgatatcctgataaaaggaacacacatctctatcattgctccctttccccttcctccatctgggaatgcagatgtgatgacagaagctgccatagccactctgcagtcatgaggcaaaaaacacaaaagcatgaggacaaagtgccatcatgctaaggagagcacagcaaaaagacagaaaggctctggtcctaaatggcacagctaacaagtgcccatttccatgcctcttgccaaccaacacaattcatgtccttatgatttcaatccctggtggtcaggttttggtcacttgaagctaaaagcattcctaactgattcaaaccccaaataaaaacattgccctaatgatgaaacagaaattggttactttggcctcaattaaaaaatgaaatgtagctaatctttaacaaattcaatcctaaatagttctctttatgcctactgtcaggcaggcccttcttctgtggctggatctgatttcctaaagccttaatttctaactcaacatagcaaagaggtggagggaagccatcgtgcccaaaccctcatgggggtcatgacttacagttgactgaggatggcctccatttatcacatagtctattgcaacttgaggttcctttaacaaatactaggttataacatttaaagctgatatcacagcttctgttacaagaatattattgtactagtttcctaaggttgttgtataaattaccataaactgggtggcttgaaacagaaatttattctcttatagttctgggggccagaattctgaaatcagtgtgtcagcagggcattctccctctgaaggctcaaggggagaatccttccttgcttctttgagcttctggtggctccaggtgttccttggcttgtggcagcatcacgccaatcttcgtcttgtctttacatggccttctctgcttcctcttctcttttgtctgtcttcttttcttataaaaacacttgtttgacttagggcctatcctgttaatccaagatgatctgatcttggatcctaaatgaattagatttataaacactccttttccaaataaggtcacattcacaggttctacgtggacatatcttttggaatgccaccattcaatctactacaactctagaaaatttattccactttccttatttatttttgttgggtctcatgaactttgatttttttaagctgtgtgaggaaacatttatggcaatttaagttttgtgttgcatcagaatttaaggttgtttcaggaaacacgtgttttatttcacattttaaagtaaagaattatttctctgattacattttagtctttatttctcatgttaaagtaaaaaataggtgacttcagatcagtaagtatatcatggtagtgatattaaagagtatttactaggcttagtataactcaggcaaaacatttcttgcaaattattcaccataatctttgacataggctggattattagttttaaggcatgaattactttctacccaggtcaatggtttttaaccctgttacacattatagtcacctggtgaacctttaaaaatgcatgcccaggacccatttcaaccaatgaatgcaaatatgtggggatgagcttgtgcataaaagtctcctaagttattcttatgtatagtgaggattaaaaactgaccttgactcttattagcagttgccttattcaacaccatttatttattcaatcaagtaatcattatgcacttttaagtgtgtaagtagttgcagtacatataaggacatataagaaatgcaggtttataatttagtagtcatggtgtataatattttgtgtaatgtgccatttatactccagggtggtagagccaaatgcttatagagaccttctctgctggtcactcttaaaaattcaaatcaatttatagaagtaacttgtatcacaaaaaattagccaggcatggtgaagcatgcctgtaatcccagctactcaggaggctgaggcaggagaatcacttgaacccaggaggcagaggttgcagtgagccaagatcgcaccactgcactccagcctgggtgacagagtgagactccatctcaaaaaaaaaaaaagtaacttgtatcattattgctttaactcctctgcactcaggtgcgtgtgtgaacacacacacacattgctggtaataatcagagcaaaataagactcctatggttgactatcttcagattacaccctttacaaggtcaggagccttttaattattttagatcccccttccgcagagtagaaaccaatatatgcttgtaaaaactcacgactggtagtgatccctattagtagaaaaagcttgagcagtaaagttgcctgtgccctggagaagtgctgaggactagaaattcctctagcttccagctatttgggaagacccttgggtgttgagccaacattggcaggtgcgaaagggaatgacactggggctgaggagaggatctggcagccaattagcagcgcttgttagagctcaccccagactgctgtgtgactgctcattcagacattcatagacacccctgtcacaaataagccacccagagctctgtagtcgtacaaagcagcaataggagtggagaagaaccatgtttgtcaggaaggccctgcatgcaagagagcggcagggcagagagcagagtagagcttggaggctatagttgtaataagctttcaggaaaagagaactgagcaccttaattattttatttttttttttgacatggtcttggtctgtcacccaggctggagtgcaatggcacaatcactgctcatttgcagcctgatctcctgggcttaagcaatccttccacctcagcctcctgagtagctgggaccataggcgtgtgcaaccatgctcagctagtttttgcattttttgtagagacggggtttcgccatgttgcccaggctggtctcaaactcatggactcaagcaatccacctgccttggcctcccaaagtgctgggattacaggcatgagccactgcacctgacaagcaatttaatccgaggagtcatggagtcttatacatgtgaagtcttgttgatgaaagataggaagatggagaggagctggaggagaacatgatattaagccaagtatttaaaaactactgatgagctaggaatcaagctgagtgcattcattcatatgttaatcaaatactttttgaacatcttctatgtgtttcaggtgttgacagtgcagaggtgagcacgtgttctccagggtgaaggacactggaggagatttagggttataaaaacaaacagataacaaatgcacatatattcagagtaacatgatagaaatagatggtcaggagataccacctcagtttgggcgatgaggaaggccttgacccaaggaggtgacatgatgtgagctgagatgatgtggaaggtgttggggcttagaaaacaacaccccaaaatgaaggcctcagaagcagcctcagaagcaaaagtttttctctgaccttctcctgccctcctgtttctcagtcccattctctcctgaggctagctatagaaactaggatccctcttccccagggtgggtcatagaaaccagaccccttcttccccaaagccagccataaaatctaaaaatattactctaactttccctccacctttctatgtgaaaactggccacagagaaattatctgacttaccttgtttgactgtaggtcgtaatacccccattccagagagggtcttgcccaacacagagaaggaaggaatgcatgctcaggggggccaagaagaatctagacagacaggccttcctggctttcttcactcagtctattagcattagatcagaccctttttttggtccaataatatttcggcacagctgtccatactttgttgaaacgaagtgtaaaaatggacaatctccccagtatttttgggtcttcatcctgaaggctcccatgtttacatgctaaataaatttgtatgccttttctcttagtaatctgcttgaatgtgaattgatttttcagcaaacctttagagggccaagggcaactttcttcttggccccaacaaaggagaaggacggagatgcatgtaaagcggtccaggcagagggaagagcaactgtaatggccctgaggcaggaatatacttggagtttgcaaagaatcagatgatatccaggctagaatcagagtaagggcatgtctggaaaaagtggaaaaggcagcaggggttaatgataagcacgtggccatggctgggcttcgggaagggtgaggcttcaggtctttgtggtttggtctgaaagcgactgaggttccactgggtgagctgctcagggcacatcctgatgcagacagcctgttggctctgacagcagctctcccatcctcccagctgcaatgactgccgagttggctttgctttgagtattccaatcacacagggcctgcacctctctgcattccctgggggtgattttgatagtttctctgtgtgcacagtgattttgaggcaggagatacatgagcgactgcagcagcataagaagtcagtggtgtcaatgcctgacaactaccatgactgaaaaagttagattcctgaagtgacttcatttatattgccatatcctgacagaatctgaggccactcttggtatatgaacacagtatcatcttatatatatggaaataaaaaagaatgggaggtttttttttttcttaagcaaaaggaaaatattaactcaagacccaaactgttttattcatttgtggactcccacaataccttccttacacagttatttcactgattctagaacacacacttttcctcatttaccatctgtgaaatgataatgcatcttacaatccacagtgcctcacaattgccatcacatggttgtcatagcccatacccacatgcttggtcatagctgttcatgtgttgagtataattggcatttaaactgtgttcaaaatgattacattataatttggcatcagtacttggaaagatacaaatacagtagggagaggataatttgatatttgtgaagcaaataacttcactggagaagagactgcaatgacatatttcctttaaaagcagtaaccatgtgcattgtgggtctgaaggaaggaagatatccacaaatgcatgaggccttattatgctttgttactgcaatatatgaaaaagattacatgttacatgccaaggaactcaacaaaggcaggagtaattgacaaagccctctatatgaaggaaatgttcaatctgtgtgaggctgtgatgggtttatgtgttggacagaatcaccataaggctctgtgtcacagattaattggcagcacttgtttttcttttgtaggaatgcataacataatgatgcatcttataatagatggtatttctaggttccatgaaatagagtggaacaaagtagatgtttttgtcgttagactagggctatgcaaatactagacctcacttatcccatcacgttcaaaatgtctctgcagtttatttacatattaccaaagagctgtccacttgaaaacttatagtcagcattgtgtctcaagccaaggtaaaccaaactaaacattcttatggcaacatggccaggcgctgtggctcacgtctgtaatcccagcactttgggaggccgtggtgggcagatcacgaggtcaggagttcgagaccagcctggccaaaatagtgaaaccccatcttgactaaaaatacagaaaactagctgggtgtggtggcgggtccctgtaatcctagctactcgggaggctgaggcttgaacctgggaggcagaggttgcagtgagccgagatagcgctgctgcacaccagctggggcgacagagctctgtctcaaaaaaaaaaaaaattcttacagaaacttgatactcttggttggtgaactgaattttatcaaaagcatctatggcacacaggcagatgattgtagaatacatggccttaatgaaaaataagctaactgcttaggcgattatttcaaattcagtttaaggaagtcactgtgttttagcgtctgattttgaacatcaggactaaagaccctgaggcttttttcctttaaggtactatcaggtcagtgtgaaaaagctgtttgccaggggagccagttggaaatgaatgaaataatttacattcctgctgtgggcaagttgtcaatcattatgtgtgaagcctgtaccatcatttttctcctatatctacacaaggatgctgtcttaaggatgtagtcaagtgccgtgacaaatagcaggtcaatagctgaggacacgttgcctggtgtgtggtggtagagaaagggcacacctctattccccaaactccaggccggctgcttgatgtaatagcaggttgtaaagtgaaaaagcttctgcatgaaaggatagcctttacatggggtacagagcgcagaaacgttttttggccacacattggtttttctcagccatggatcataatgattatcagtagaatcatttgttttaaatgcagagaagagctgaaatgcttctatgtatcattgcttctggagatttctagaaatgtgtgctaggtagttcaatttaccatgtccaaatggaactcttgatttctccctccaaattttccctaacaaatattcccaatctcaagaaacctcaggccaaaaacatttccaccgatccttaattcctttgatttatctacaatcaatatcacattcatcatctctattttccttgtaaatcctgactcagatattctcaccttcttcaccacaccactttagtacaaggcaccaccatctcttgccccgactactaggtgaatgcctcagtaggttttcaatgacctccatccccattcccacagcagccaaagtgagcctttcaagcataaaccaaaccatatctctctcctgtttaacacccctctgatgctcatgctcacatttagattactatgcaacccctctccacagctcacaatacctgatcctgggccaccactgtgacatcttttctatcagccttttccctggctcatgctactacagccacactggcttccttgctggtcctcaaacaggcacggtcctgccgcaggggatctgcacttgccgctccctcagcctggagtgctgatctctgcatggcttcttcccacacttggttcagatctctgcctaaatgaaacctccttaaagaagtctttcctgatcaccctcctgaagatctggtcactgtctatcctcttaccctgctctatgtttccttatagtatgtgccactagctgatatcatattacagacttatctgttacctgcttattgtctttgtccagctctagaatgtaagttccataagagcaggagctctgttggttttgtttccaatgcatttctagagactagaacagtgcttggcatatagtaggtgttcagtaaatattttcattcaatataaatactacatatacttcttcatatgtcgtcttcccagttggacactttctaggcatactgggccctcacaaagatatatagagtgtggactacctttcaactgaagcattttaccggacatgccaactgatggcagcacccagggatggcaatgagatggtgtgtgcatcacccaagtggccctccacagtcaagtaggtcgctgaagtctgtctctgatgactttgcctcccacgtcttcctctgtgtctttctttcccattcctcccctggcagcaattcattcagtgggtatttttaagcacctgctttgtaaagggcattgtgtgaacatacagctgagccctccgaagtcaggtcttcaaggagtttggtgtctggtggagaggcgcgatgaacccacacaaatacaagggctggtaaaaggtgaagtgtcttgccccagtggaataaggaactagaaactgaaattggctcatctgactctgagtccagcctctcatccactctgctgccttgcagcccacccaagcctgccttccctctggcgctcctctgcagtttgtttgtttgtttgtttgtttatttatttattattatactttaagttttagggtatatgtgcacaatgcgcaggttagttacatatgtatacatgtgccatgctggtgcgctgcacccactaactcgtcctctgcagttttaatctttgttctaaatcctccttttccccttctctatattcaaagcaccaaatcctgcccttctaggtgaagttatacatcagctgatgatcagatcagactagttcacagtaagtgagaatgactcatagatttagttctctcaggtggcgtttgtattgtagtttgtctctgctgcagccagtcacaaggagatacatgtgtgggagtatctgtttctctatttttggggggactgcgggaaaaaggatgccacctggggtctgcttatttactgtaagtctttctaccttaccctgcctcttgggcttccataatgaagtaggtctggccatgggtctttctccttccttagtacaatttctaaagggaaggcaatattccatttttggcatttgggaggtggtgaaacaggcaccctctctgttctctctcactctttctctctctctatgtgcgtgtgcgtgtgtgtgtgtgtgtgtgtgtatagtggtactacagggtcatttataccagcacgcctcataagttgcacccctgttcgtcttgtgcaccatgtgccctccagtggctgccacgaagaagaaatggaacttcctaagtcagccatcctgacagacactgttggaaactttctctgcaaggctgagaacatgagggaaagactgcggatgttcattctgttgttaaacgtatctctgttgcaagaccagcctagtgtaccgcctttcatgacacaatacatctgtgaatataaaataacaggaactggtggcttttctcatcaaaatccaaccagttctcttcagacacttcttaacctgtaaaatgggaatggcaacagtgtgcatctcatagggttcaggtgaggggaaatatatcaggatatatgatgtatatatgacatatatgtcagacttagaacactctcacacaaaagtgtctttaggtcaatcaacaggtatttatttgccacctccggtgtgctagaaactgttctaggagctggggatacaggagtcaacaaaataatctatgccctgatggggctgattgtggttaataatcatgatagcaaaggcatagccaggatccaaatccccgcagtctagctccgagtccccagtctcctccatgactccatagcacctcttgttcactgagcaagagaatgcgaataatacacttgagatgacgttgtgagttgagagcctggacctcagggataaagacctgtacttggcagccatctactttgagtctgctagctgaaacctgtccaagaacataacactggggaaaggaggtttgagaaaaaattcttgagcaagattgacaattaacgaaggggaagataaaggaagagttactaaaacaaattcccattattgttactactattattccctgtgctcatctagaggagtcaagtaacctaaggaatcaaattcaatgaaaaaatattggttgcacacccactctgagcgaagagtggatgtgcaacaaatatttgagcaaggcacgaaaatgatttttcattagacagatactttgcaatttaattttctaaaatagctgagtttgatggtcaatgagttcaataaacaattttccagctttttatatatctagcaattccatgatcacacagtgtgtttatcatctatcattctccaattactgaatattggttggggttcctgtcccccagttttccatacatttaggcctccttgcatggtaccctatccaggtcatttttttccccccggtgagcccccattgatcatcttagattttctgagatggttttgatttcacatattttgagtgggggcttacaaacaataataagatcatccataattctaaaatctctcttcttttctctaattaaaacctttgtgggccaggcacattgactcatgcctgtaatcccagcactttgggatgcctacataggaggatcacttgagcccaggagttcacaacaagcctaggtaacataaggaaacaccgtctctacaaataataaaaataaattagtcaggtgtggtggtgtgcgcctagtcccagctacttgggaggctgagaagggagcactgcctgagcctggaaggttgaggatgcagtgaaacttgattgcaccactgcactctagcctgggtgacaagtgagaccctgtctcgaaacaacaacaacaaaacaaaacaaaacaaaataaaacaaaaaaacccataaaacaccaaaataaaacaacccccccaaaatctctggggtgcactgattgcagtaatggtcccatttcttcacccttccctactctcaagctatttaccgtgtgattttgcagttgctcctattgagaggtgaactatatcctcccctcccaagctgattttgagttttccatatagcttcctttggccaagtgttggcagatgtgatgtaagtagaggtgtaaaaaagcgcttgctcatttttgtttgtttgtttctttctttgttatgaagacatgtctgcgatagcatactagagagtggggcacagggagtcccagctgtttcagctgagaccaccccaggtcagtcaactctcatatgccagaagactagagccaactgccagatgtgagggagccagatgagatcagaagaaatttgcagccaagcccagcctaaatcgctgacccacaaactgtaagctcagctaaacaaatgtctatcgctttaagccacttcattttcagacagcttgttccatagcattgttgaggcaatggataactgataatgcttcccataaatcttaggaacttggaagctgcccctccatttgccctcctttaagcaaaaaattgaatgctatttgcaaagcattgtataaaatgctttattagattatcttattgaatcctgacaacaatatctagcagacagatataatgctattatccaaatttcagaggcaaggaaattgaagcttagagaagtttaagtgacttgaccaaagtgcttttagaaaagcagagattctacaaccagtcttctaaatcttggaagactgcttttagccacggctgcctgccatttactctttggattctccattctacctgttctgctgcctacttctaccacctaattaggagaagaccttgtgttcccatttgggatatagatacccactttcatactgggtttacccctaatatttctctccataccactcatgtagatggttgtcttccgcattaatctggaaattttttgagggtaaagactaaaatacttatatttttatccccacaactctatgcagtatttttttaaaaaagatcatagtcatgttttaaggtagctattccataaaacatataaaaaggtaaaaaatactctcctagagaatatatgcatatttaaaaggacactgttattcaaattaatctaatttgtggaatacacagtagagggttttccccattttgttaaatagttttagttatatgttatttgaatgtagtgtttgcctgaatatctacaaaaataaaactctcttgactcatttatagattaattccagaagcagggattaatacaaaactggcagtgaataatttctgttttgcagttagtttctgcatttaagaaattgctttagggttcagtaacttgccctggacttcaggtatgctgccaccagatggcagcagggtgccaggcataaggcttgtaagcaaagaatttgtgtgctttctgaggctcaaggtaatagctctttccttaagttcaaaaagattttcagaccactgatttccaatttagcataatacatttctttacaaaaataggtaaactaaaactctaagccaccctaagacatctttagaacagatataaatcccaagctataaaatcacctaactcattattacttctcttctctagcatctaattatttctgtaatggcttatacaccatgatggcttatacgaatcttatacacctacctcagtgatagtgttaaccattataatttactttgaatctttatgatcaatctctgccatggcaccgtgtatgttagttttcaaaattctcaatagtttttctccaggtaaaaaaaatctatctggctttcctttcatctgtcttaagagagcagaggtttatcttttcagtattatctgagatcttctcttaagaccaaaagtatttctccactacagtggcatgaacagtgtttatttgcatttcgtgtatgtatttgtgaatatggagtacttttgcttttgtattttctatactatataataatctactagaatatttcccctctcaaagctcttggaagcacagaggcagtttaccatactttaacagaaatatagctggattaaaattttttttttttagcaacaggctctgccctaaatatctcaagaaaatactttaaagaacaaaaatcttcatgccaaattagcaagatacaggaaaaaaggtaagtgggcaaaatacagggaaaaaaagctaattcaccctgacagttgttacacaaagctgagagagtctttccctctcacatttacaaagtccaggagcggaaagactttcagcaggagtaagccatgagggtttggacaaggctggtaggggaaaatgttatctcctgggcatactgggaagctgagagtccagggcaggtgaatggggttggagatgggaatgagggaggacagcatctgagcagtaaatcctggaactagagttagcatatcaagcagggctatctatgcacccaaggtaagttctggctgggagaagcagatggcaactaagctgtgaaaataggctccaagggaccagctcccagcgtaactctgggggagggatctggggaagtacaaaaaacatagagaggcaaaagacaaataaaataggaggagaagagaaagggatggatcatagaaagctcttatttgattttgagtctcacaggaaacccatgaagccagcagggcaggtattttttatcctctatttacaaatgagaaactgagtcccagagggggtaagtgactttttttaaggtcaacataccgaggggcggatataagattcaaagtcaagtgacctgattccaagctaaagatgaaagaagagagggcacatttgaaaccctgacacacacactgtatgtcctactctttgctttataaacagtaagtaaaattttcaaataatggaagcttagtcttttaagggtcaaacggaagcagctttagccactgttgaaaagcatttctgaaatgtattatatttgcccttgcctcctttgaaaactgactgtaatctactctcttcttgatacatgggttataattacaaaaatttactatatttatgaacttctaattcagtagataccctcaggttctatggaggcacatgtgttttttaaaaaattaattttttttgctgccccacctaatacattcatggctagaaatagctgtgtagcagaactggctgagtcagctccttcttccctcacagccagctcttccttcttaagtgtgtctgctgctggtccctatctactgcttctgatcaggtcattccgcttattaaaatcctttagtgactccctctaaccactggttgcagtagtttgcaaaacaggctgcacatgaaaatcacttgaggagcttttaagacctcctgatacccaggtgccaacacgaaagatttcaattcaattgttttagatatggggccctcacctacagggattaacataagtagcatgaactcttgcttctggccaagatggaataacgggggctagatttatctttccaatggacacaactaaaagtccagatgaatatattaaacaatggttttcaaggcaacgggcatgaggcattgaaggacagtgatccctgagagatggaaaacaaacaaaatgagttgcatttgcctgcaattgcccctgagagaatttctaggccatgcagcagaaaggaagaattcagaaggagtctgcaagactccttaaatagaaaagatgaagcagagaatccaggtagactagcgtggctagagtttgccaggcagagtattagagagcagggagttctgatcagtacatgcatgtgaggaaatggtataaaatcaaatgaaaaaccagctgaaaagatgagtaggaatagtctttaaagttcaaactggactggtaaaactgagatttgaaaactattcaaattgggaagccctgaaattcaaagagcattggtcaagtactcagaagggtattgccctcgtggtggggaagtattgtcaatagactaaacaatactctgccttgcctaaccttaaaagcaagacctgaaagatcaaagactattcaaagaattttcctgtatcccagagcaatacccaaaaatatctgtaggaataaaaaaaaaatccagcatccaacaaggtaaaattcataatgtctggcgtgtaataaaaattaccagacatgcaaaaaaacagcaaggagaaaaatcaataaaacccaaacctaaactgacacaggtgttacaattagaagacaaagatattaaaccagtaactgtaactgtattccatatgttccacaagttggaggaaacagcatgtttaatagagacagaaaatataagaaagacccaagtctggccgggtgcggtggctcatgcctgtaatcccagcactttgggaggccgaggcaggcggatcacaaggtcaggagatggagaccatcctggctaacacgctgaaaccccgtctctactaaaaatacaaaaaattagctgagtaaggtggtgggcacctgtagtcccagctacttggaaggctgaggcagaagaatggtgtgaacccaggaggtggagcttgcagtgagcagagattgcagagattgtgccactgcactccagcctgggcaacagagcgagactctgtcttaaaaaaaaagaaaaaaaaaagaaaaagaaagacccaagtctaacttgtgaagatgaaaactataatgtccgagataaaaaatacactgcatagtaacagtgacagattagctattctaagaagaaaagatgagtgaacttaaagacatagcaatagaaacaatccaaatgtgtcacagagagaaaaaagactgaaaaaaaatgaataggacattggtgaactgtagtacaactttaaatgacctaatactgatgtatttggggtttccaaatgagaggagaaataaggtgagtaatagaaaatattctgaggccagatatggtggcttacaactgtaatcccagcactttgggaggccaaggcaggtggatcacttgaggtcaggagttcaagaccagcctggccaacatggtgaaaccctatctccactaaaaatacaaaaattagccagatgtggtgtcgcatgcctgcagtcccagctacttgagaggctgaggcaggagaatcgcttgaacctgggaggcggaggttgcagtgagctgagattgtgccactgcactccagcctggatgagagaataagactctgtctcagaaaaacaaaaaaatttaagagataatgactaaaaaatttccaaagttgatgacaatgataagtctcatatttaagaagctcaaaaaacttcgcacatagaaaacatgcaaaaaatgataccaatgtgtgtaataatcaaattgctgtaaaccagtgaaaaagacaacaccttcagtgcagccagggggaaaaaaactgacccattatgtatagaggaacaacaaaatggcggcaggtttcttgttagaaataaagcagaagagaggctggtggagcaatatctttaaagtactgttcgttagaattctatacccagcaaaactatgtttcatgaatgaaggcaaaatgaagtatttttcagacatacaaaagctgtgaaaatttatcactagcagcctcacactatagaataatgtcaaagacagtccttcaggtagaaggaaaatgacaccagatggaactaagggtctacataaaggaatgaagagcttggttggcttcaagggtgtgtgacctgtatggttacacaaggtcctgcagatagaagggccttgtgctagctttaatgttttgatgttactggctaaaaatttttaataatttttgaacaaggggccctatattttcattttgcactggtagctggtcctgatgaagaatacttagtagtccatagaggtggaggcagaggctggaatgccgagcttggctctgaagatccaggccatatgttcaggcatggaatagggaagagatggaggtggcttcttcagaggaaatttggaatgttttaattttaatcacgagaagggtgaatgaacagatgtccactaaaataaaaattttaaggtagcaatttctgggtaattagaacacaattttcctttctgcacagagatagatcataaatggctataattagagagtttcagttttttctgaagttcatttgttgcggagtgttcaaaactgtctcttcaggccaaaatgccttgtttattgtgtgtgtgttttactatttctgatatcaatgctttaataatgcctgttctgtaatattggcccagaggtactgcaagagtgtaaattcactttacatgaaaaagaaaagctatattacttccaatgacattttagtgattaaatgcattttatttgtagtataattctatcccagtttaggtcaaagctccgaagttgagagtagtataataagtgtggacatgcaaaagatgctgaaaggtagtagaaataataatgtcagatctagcccatcaccaccctccagaacatatatgaaaggattagaaatcaatgttaagtgtgtatttatttgggagactgtccatcctaaatgaggacaaatgtcagggtgcttttcccaaaacttgggctggctgagggaagcttcaagagaatccctggaacagcttgaaatctggatgcagggggtggagttggtagagtccagaagctttacctgatatatgcctggaaaagtctaaagctcagaggtggtatctagctgtcctgaaggcttgtggggagccagctgtactgtatataggtataaatgcaatgcttaaatccacagataatttataaagttcactctacacttgaatactcacatccagtcatttagttgaagccttcggctttgattaaagttgttaatatttgaagtgctgactgatgtaacctccctggtatggaaatatgaatatttctcatttattatgtcccgtggtgaaagcataaccttttacttaaaataattggtttgaaaatggaattagaatattcatcctccccattcctcccctgcaatttgtgaatttagtaattattcttcttggttatgagcataagttaccatttacctttattcaatatgtacacacgcacacacacacacacacccacacactctcacagaatgcaaaaaaaaaattaggaaataaagttatcgcaactttagcaatgagagcggggtagacagaagtgtgagtttataatgctgatcatgaaataaaaacttcaaagcaagcctaaatctgatactcataggatgatagctctactgcatttaaagcaaataaagttacatttctcaagaattaatgcaaaattagaaagtttcctttgaaaatctcttagcacatctccaagtggttagctttcctgggaaagctggaaattaaatcaacaacattgaaagaaaaaaaacctcacagtcctaaattaaacagtcatgtaaatatagtttccaaagctattaggcaagaagcaaatgattttctaatcaatttactgttgcaaaaataatgccagattattttcatggggcatgtgaaataatttacatgggacacacgtggatattgctaccttagcaatcttatctagttctacccaaaggtatttaaaaaacaaccactgacgctgaagttatttgtaatcatatcagcagcctatctcctcatcctccattctcttcccctccaccagctgacttttgtatcaaaggcaggctacccttgcacttctcttttcacttaacatagaacaacagttactggagcaatctggttcccttaaaactagcgactcattacaatggttcaggatgtgaacttccctaaaaggctttgctctaaatcaaggtgactgtacattcccttttaggctagaaaacaacaaactatgcattcttagtataggattattcagcccatatattatatgagactacctcatatttgggtacctctctcattagttgggataaacaagtcttgaatttgagataattcaaaatctttgtaagccaaaggcatgcacacattttgcctttttctcattttaaaacccagtaacccaaaaccatcacatgaactacccaattctattgggcatacaaattttgttttctgatttccaagtctgaaggttcaggtcaatatttgtccgtaattaacatggacataattaatctgctgagttaaatgacatacaaatcctcaccaccaagagtgtgaacttgcccataaagttgtcacacagaaaattgaattcaatcagcttactttaaggaaaatatactgagttagtggtagacacagatggcatgcttcagaggattttggccttaaggtctaagagacagtgactatgttttcaaattttgacacaatgcttgtgacaggcacttctccctgtattgaagccagaaaactgttaagagccaacatgggtggaaaagaccagttttctttttttctttttctttttttttttttttttttgagacagagtcttgctcagtcacccaggctggagtgcagtggcgcgatctctgctcactgcaagctctgcctcctgggttcatgccattctcctgcctcagcctcccgagtagctgggactacaggtgcccgccaccacgcccggctaatttttttttttttgtatttttcatagaggcagggtttcaccatgttagccaggatggtctgatctcctgatgttgtgatccgcccgcctcgacctcccaaagtgctgggattaccggcgtgaaccaccacgcctgactagaaaagactaattttctgtctcaagtcaaggctgattggcctcatgggtggtggtggatcagtccctaagccccggcagtaaagccaggggccgtgatccccatagtcactgcagctgtctacaaggtctggctgcagtcactaaacaaggatctctaggccacaggtacccccggcactggggaaagtgagtgcccaagcttacatcttaaacactagttcaggcctttggattttgagagacatagagcctcacattgtaagtgatccttacttcagtgaaaacatataatagagtcctattgaaatccattctttacaatgggagattactgctaatgctagctaggtgagtgattcatgtgctacctattgtaagtattaattcttcattaggtagcagtgtgattcagaaaatgttacatagggatatttttcaagctattccattaactaattaactgggatgcaacttaagttggaagattgtttggttgatgtatggaaggtacccctttaaaaaatatctatgagtagccatgtgatgagtgtcaagttcttgacagagaattgaaatcttagcctgctgcgaccaaaaagcaatactgtttcagttagttccgttgccacacagactgaatgaaattaaccaaaggctttatgttagacaatgagtctcttctgaaataatgatagcttttgtgagggcataagaagcagaaagttaagaaagagttacttatggccatacaatcacattaatttgtctatttaatgtgacttttagattcaagaacaatttctatacgatgttctagaaaagacattattttttcagaaagacttttaaaagcaaggaattaattagttactaataataaccatcatttaaaataagcaatggcatgtaatgtgtagaaccgggacttttggcgagaaagtgacataaagagtagaacagagcacttttgaaccagcagaaacttatttgctttatctcttagttcataaatgccattttcctcaatcatttactataaaactaaaactattctttaaaaacctaagtgatttctcattgttactgttaaaaagaaatgtgtgctatgccaaatacaattcaaatgaatgaccattttatgttacattttcatcttattccttcatttatgctagaaaataacaaaagtaaaaatgcaatgagaaaagtatcaaagtcatgtatgcagattcagttgatctctttgggcttgactatttggcaacatatgttggccagtttttataggaaatctatgctaagtgtatgaataaaacagagacaacgtaagattagacactagcttcagaaaataaaattttgataatacagcagcctatttagtaagaataaaagcagtctcttggagtgtgggatttgtatatgtgattaagaaatagagacaaggggccgggcgcggtggctcacgcctgtaatcccagcactttgggaggccgaggcgggtggatcatgaggtcaggagatcgagaccatcctggctaacaaggtgaaaccccgtctctactaaaaaatacaaaaaattagccgggcgcggtggcgggcgcctgtagtcccagctactcgggaggctgaggcaggagaatggcgtgaacccgggaagcggagcttgcagtgagccgagattgcgccactgcagtccgcagtccgacctgggcgacagagcgagactccgtctcaaaaaaaaaaaaaaaaaaaaaaaagaaatagagacaaggaaacatgatagagatagaaaactaaaaaaatgataatttaaatctttaacagtgaatatgagcaaagatcagaataggaacctatttattatcatatctatatcctataactgaaaaaatttcctaaaaaggagaacacaaaaatgcttggaagattttcttggataatgcaaaataccctgggagttctctctttacctcttagttcccccacatttaaacttcaaaagacaatgactctggagcttgagagagatcgatatttaaaacagaaggcatatctataaatccccattggatgtccaaacacttataaaaaaagaaaattaaatttcatttatcaagggttgaatagttaaggtgtcactaagagaccaacttacattaataagttcaacctcccagatttttttcaacaggtccatcgaagtgtagccattaattagaaaggctttggtgtagtcgcccagttcaatggaatccagccactcagctacagaggtgggatggtagccatcatgcccaatgggtctcatctgtaataaagaaaattacattaggattaaactgtatactttgtgtcccaacaacagaatgcagatttccccttgaaaatttatttgacatgaagaacagatctttctggagacggaaacaaggaaaaagaaaacactttctgatgtgttttcacaattctaaaacattaataattttcacgctgaataggttttcaaaatatacacagaaatttccaatttagctgctagattaactctatatttggaagagctaaacatgtcaaacttctgtcatagacattattggcattctggtgggtggaattaaaaatgatgtcagttgaatggcattaaattcgatgcgaaagtcaccaggaagtgcactttcaacatgtagatgataattctcatatgcacagcaccaaagcatgtgaaaatactgcatgacttaagcattcaaagggaatttgtgcttatgcaagacatgtattggaggtagtgcaaacacgctggagaaacatactgctgcggtgaaccagtaaaggagaggcctttgggtattttaagaccatgtgttctgcatcgactctacagtatgttagacatgaatagagaacttgctggcagacaggcatctattttttgtcagctatatacagatttttaaaaaataggagaacaaagaaatgtgacagcaacataatgtttctgagtttaaattggagtgtgaaagtaatttaagcaagaggaacttctgggtttaaaattttgtatggattattctggtcctttagcttttatttgaaattgtagctgaatctgtggttcttggttttcgaagtgactcacttctaaaacttgggctgctttgcatgccacgccgtatatctaatacttcagtttttcaggagagctggcacctcatcaacctgatgggggccttcggtaaaattcacgatggaaacagcaaggctgggcaaaacacaacatagattttcctctttctttgattcaaagagataaatattaatggaaatttatatgattctgatttgcgagcagagaaaagattagtctgggaatcagggattcagattttaatcttaaacatggtaagctttctatcactatgcatggttctcatttttgagattctccctactccttcattttaaagttactttttctcttttccagttgttccgctccccattctagtttccatttcaaagtttaaatgttctctgttttattttattttttttgaaatggagtcttgctctattgcccaggctggagtgcagtggtgtgatctcagctcactgcaacctccacctcctgggttcaagcaattctcattcctcagcctcccgagtagctggaactacaggtgagtgtcaccaagcctggctaatttttgtatgtgtctctactaagagacagagtttcaccatgttggccaggctggtctcaaactcctgacctcaagtgattcacctgccttggcttcctcccaaagtgctgggattacaggcatgagccactgctcctggcctaaatgttctctattttaaagttagagtacaatttattatttacattagagtctgaacttggtcagacttttgtacttcacttttacattgactgacccattttagctactcattaaatatttgttcatgtaacacttaactctgtgtttattatgtggtagctacaaatgtaaatgacaactcagcatttgcagaatgaaagtcagtggcattcacaaatccctggatgttatgtatgtataagatcagaggctaggacccaaaagggaggctcatagatattcggtagcttcatattctatagagaattacaaaaatattggggctgggtacattctccaggcctcgttaaaaggtggttgaactaactctgttaacctaaataatcactctggccccaggaatcttcctgactgccccagtgacatgaaataagaaagaaagggaagaaagtgagaaacactaaggttgaagttaactgcttagtagggaggtcttgccgttggcccatccataaagctgaccactccagcagcagatactcgggaaaagcttagggagtcttgatgactggatttgggtcaaagtcagttgtctcataccagtgaactgtgcaatggggttaccacaggttacccccaagcacttacacaacactcttttgaggaagcaattagtggccatctgacacacagagggtgttgatggtcggtggtggccaaagaatcagggaacccatgacaggactgcaaagaaaatctaggtaagtacaaagatgtttgcttgtccctccaatccccctttcttgtcccaatgccagaaaatttagaatcagaagagagaagtgccagtcccttaggggaagtctaaacttgggggggggggaggtggtgaggaaaataaaactggaggtttcaaataaattggaactgagccttcaacattttacatggttggaaagttattggaaatgtctgagatgatatttataaatagtaaagggagggtcagttgagcttggttgaatgattggaaaataaaaaaataaaataaaacagcaaccatcatatcaggattgcacggaatgcaggctgttcagtggtctgattactcctgtaaggcaagttctcctagaccaatcttaaagaggtgagagggagggaaatatttggtgggaggatgaaagacaagggcagggtagagagcacaactgaagagaccttggaaatgggtatgctgaggtgtacagggcagtatcatccgcccactcattcaataaatatttaatcaatgcctattctgatgaatgttgtggaaatggtagagaacaaaacagtcatagtctctccctcatggagattataactcttaattaaaatatgcaaacagatgaccaataaattatgaaggttctgcatacctgaagagaggaaaccattagagccaaatgcagttacaaaattaacttgacacatatttaatgatatgcagaatagttactgtgctgcacaataatttcttccaaagcaatgatcccatctgttcctttatttctgtccctactgccattaccctgtttaggttcttgttagtgcttacaaaaactaacacaatagccttctacatggtctcccacctttgatccagcttgtatcttgctactacattagtcttcctaaaagtcagacccttaagtgtacctttgtataaaagcctgtagtggctccttctcgaaaaaagtccaaatgtcctattccagcattcaaggccgattgagattagcctaatctcccactcctctgctattgtgtacccaataaatgtaactagacacgtgtatgtctaaacagtacattaaatcgctaggcattccctgaaaatgacctgtatatgacacagtcaatatctttgctaatataacttcccatgcttggaatgcttttgcccctgcttctggagtgatttcttcaggactggcttctcttcttgagctctgagatgcaaatttctaaccatttgtaggacatctcacataaatgtcctataggtgtcaccaacataagtcaaaaacaaatttaactcctttagttcaaaaacaggctctcttcctctttttttccatttcagttaagggcaactattactccactgcccaagcagaagcttgggagttatcttactttcctctttctgtttactatcatatctaattaggccaacatggtctatcaatttgatttctaagatgactctcaattcatttctcttcttccaaaatggactttggaatatgacattcccagcagtgctacgtatttgttgggtgatctttggcaagttactctttcagcctgtttcctcttttttagaataagcataataatacctattccaagtgttgttgtaaagattatatgaaatagggaataaaaattgcctagcacagtgatttgaatataatagctattcaattataactcttagttctcttttctccccattgccctaaattagacccatgcttattttgaaattgcataatattctgccattggctgctagtcttttcagcttccaatcaaagctctcctctctcatcccttcctatttcctctatttccttccttctttatcttgttttagaaatggtttgcatctgctaacatctttacccctctccccttcagccgacagttattttttagaaacatatctaacgaggtcactcaagtcgattgaactgtttattccaattcttcgttctcttactgtattagaattatgcccctgtgccctttgccaagggatcaacattatgtctcagtgtggctggagttacttcccagtctcatcaatgctggccaatagaatgcgtgaagtgtcagtgtggtggttagagacgaggtctctgtgctcctgtgttctactaatctttcagtgttcatatgctctctcataagaatagcaagtgctgagaagttgcataactcctggttctaggagaaagatgaagactcgtggagcaaacctaaatttaacccaaagcttggaatctaccctagctcgatggggctcaggaaagtccagatgaagttagctgaagcacagcagacccgtgagtaagaaaaaaatattttttgttgttgttgctgtgaactactgaaattttgattacagggaaaaactgaatagtcactccttgtttaaaaacccttggtgtttatccattatgcctgtggaatataaatcagaccttttagtttatgaatctattggcaaatgcatcttcatgagactgagaaagattagggatgctgaataagcaaacatcagtatccttcccaagctacctcactgtcatgcagaaactctgcatgccacatcttttttttttttttttttttttaagacagagtctcactctgtcacccgggcacccaggctggaatgcagtggtgcaatcttggctcactgcagcctccgcctcctaggttcaagcaatcctcccacctcggcttccctagtagctgggaccacaggtgtgcaccactacacccggctaattttcttttgtatttttagttgagaccagggtttcaccgtgttgcccaggctggtctcaaactcctgagctcaagcgatctgcctgcctcaacctcccaaagtgttgggattacaggcacaagccactgcccctgccctatatgctgcctctttattaaccctaaactaagtaattctttattgtatgagtttgatttttggggcataatccactgtacatgtaatatacctccacatcttcgctcatgccattccctctgctaggaatacagtttctactttttctcctaatgaaattctatctatccttttttttttttttttttttttttttttttttttttgagacggagtctcgctctgtcgcccaggctggagtgcagtggcgcgatctcggctcactgcaagctccgcctcccaggttcacgccattctcctgcctcagcctcccgagtagctgggactacaggcgcccgctaccacgcccggctaattttttgtatttttagtagagacggggtttcaccgtgttagccaggatggtctcgatctcctgacctcgtgatccgcccgcctcggcctcccaaagtgctgggattacaggcgtgagccaccgcgcccggccaattctatctatccttaaaaggtcctgtttaaacgttacctcctgtgtgaatctttctctaatgttaccattattccaccgaaaaatcatatcttctgctatatttctgtagtattttccatagagttctattatagtattattaaagtctgctttcaataatagagaagtgagtatctgtcttcttcattggactgcctaccccttggtgaagaaatgaggtgttaatcatttttgaagtccctaaatcgtccagcagagcatctcacatatggcaagcatatgctaaatgtttgttaaattaagtgacttaatgaatacatgaagacaaaatgacaaattcatttcagtggcttggtatccatttgtgggagagatttgtattttgtactccatgttatgaaaactaaggttatctttttctgcctaacaataacattcataactatttaaaacctccatatatcaagaaccagttccagataggatattgtgttacagaatgcaatggactttgtttccatagcacagaagacttgattctattagccatgtagccatgggcaagtcacttcatctctctaagcttcagtggtgtcagctataaaatgaaggtattggaccaaggatctcaaagctgctttgtaattcctaaattttgcaattccatgactcgtaaattaattttaaattagtaacctatttgtttacccaggaaagaaaaaataagcccaaagacaaaactaaaattcatatatatatatatatatgataggacgtgtagactaaaggtcagatggcattcacatttctttcatgtatcttcagcagtacccacagggagcactgtgactgcattctcaaattagcaatgatgaaactttttttccagcgggaacatctggcaagacagggctaggaagtgacagctccatcggcctgccaggccagcagtgctgctaagcatgaacggaagtcaggctcactctataatctgagaggcagagtggtgagcaggcagcaggcattcattacagaggctcgcaacaaggcaatttgattcaattagttgaattccaaagtctggaaaaacctaagctgagacagaaattcgagatagcagtgaagctttagtcttgggaaaattgagatatattaacatattttttttttgccaaatgccttccttgttcttgttccacccaaatgactttcctccaggagttttttagagcatacttggcctcagagagagtatgctgttaacatcacaggtggtacagcaggcagagaaaccacaggacagtactctgtggagttctgggtttgagggggtcagctacggggcagctgaacaacccatgctctgagactgcttgatcgacttcaaccagagtaactcttattttatgcgttttatacaagtaagaggaagaaaggttttctcggctttaaaaagaaatgtttgaaaaccacgaatctagaagacttttgtaagattacatgaccactatgattttattttctcttaactttttagctttatttgaaatattatggatctgttatatatatgtggttatatatatatatacacacatatacatatatacacatcacacacacacacacacacacacacacacacacacacacacacacacatatatatagagagagagagcctgtcattccatcattctttctctttgcctgaagccagcattttctgtgcagataaggataatatcttatgagatgacggagccacaggatggaaggtatagcaggaggaaggcaataaaaacaggtaaaaaaaataaaaagagagagaaaggtgatatacattataatagctttgggattaaatgagaaaagtagttcttgatgggacaacttattaacctagaattatgatattggcatggtatttagaacaagaggataaggaaccctgaaaagccaataatggattagacaggcatttttatgtccaaaagtgttagaaaattgagaaaaagactacttgttgttcccttaaacttgtcctctcttcttccacataatggggttaaattgggttcatgcctgccggactagagacaagatacatcagctttttttctggttgctgctgtgaaaatatggttgagcctgtggaatgctaatgaaagtgttgcatgtaactttcaggtcacctctagctaaaagaagttcctcgacctagaattcctcttttttcttcatcttcctataagctggaacatcagtgactgcagttcagctttgactacacaggcaaaacaataccctggagtctgggaaatgcttctcagacctcaacgtgcttaggaatcatgcagagaatcttattagcagacgattctaattccgttatttggagggaggattggagattctgcatttctaaccagcttcctggtgatgctaatgctgtcagcccatgaaccacactttgagtagtagtgctttggaggatgacagaacaacaaatagaaggtcctcggtccttccacaattgcatagagcaaagccaccttgtaaacctgcactgctcatttcaagactattatatgagagaaattaatattcgattctttaaaccactatattatgaatgtctctatttcagtatcatagcctttccttgaatacaaacataactaaaaataaggcagtttcatgtagaacatttaaatgaagcctgtacttccatttgacattacattgtattatctcttgttttgtggggccgtaagttttcacatctgttatcgttaaagaagcttcatttcctttaactgtgtttgttggcatttctctgtcaatcacagcatcatccctttgtaacaactatgcaagggataagaggagaaaaatgcagggaaaccccaagtttctagcttggatatctgggcaaatggtggtgttaccaggtaaaagagaaaagaaaatagactgggatgacatgaataattttgagacatgagaaatttaagatgctatgctgtggaatggcactttaaatttggagaagtctggggagacacgcggccttgggcatcatcaaagtacaggtaagagtgttggcaactccacttattagctatctgacctcgagcaaatcactcatacttcctaagcatccattttctgattagtaatgtgaaagattaaaagaatatctatcgctgagcgttgccatatgtattcaatgaaactacacaaggagaatttagcacaatacttggcacacagaagcactcaataaatctttgttattttttttctgacagctgaaatcatgcacaggtaggactgcagaggtgactttgtagtgtgagaagagaagtggcctgagaatgaaccaacactttcaatgcataaggaacagataaaaataatactcaggagaccaaagaaggaatggtcaggacaagaaaagaaatgggggaaataagagtgtcaaggagagtgtggtcagcagtgaggggatgctgcagagacgtctaataaaatgatgaaggagaagggtttgtgggatcacaaataggtcatcggaaataggtcaccagacaccttattgagaagagcacagaagctgagctgccctaggttggggagtttgtatgggaagaaaagggggagatgagattttagaaagcacagaggaaaacacatggaaaggggtaaagaaatgaggactcagggttgagaagggtcagagtcataaaacagttaagttccagggtgcagtggagattgcaggggagggcttgccttttgctttgacactttgccctcctttcttgaaattacggatctgacaaggatggttggagctaacttcagggtgaatactctgtgttaaaacagtgcgagtgtttggaagctacatggtttagacttggtgagagctggatgcttgtacgtgaagtacctgtgaccttctggtgaaggtcctcacgtgggcaagagctgtcgcctgtgttgtcttcactcctcagatacaaacacagcaacctatcatttacatagacccaccagtgccgatatccctgatgtgccaggctcagctacttaaacttgcctaggaagctgccgtggaccgtggcttctcttttcccacctggatgtactttgtacactcagatttcctgcctgatatggcttttgtaatacagatagctgatatcgtcaggtacttccctctattctggctccttgttctagactcttctgctctgtcctgctgctacccaagtcttggactaacagcagtcctgaaaataaacgaggacaagcagtgctagcagacagtgtgctgccaagtccaaatgcaggtctatcaagtagtgtgaggatcaaatctacaggctgtgagacctgggcttagacatcactgtgctgtttcatcagtggctcttaaaaggctgattgaacataaaagagaaaggctgatcttctgaccacgaggccccagaaaaaagtctacctatcaccatctgagtgctatctacggcagtgcaactttgctgggagggacgtctccaaaatgctgagcactgttaatgataagaacatcacttaacaatgatgtgggactttaaagagcctcaagtgatttcacgcatgtcacctcagttgtaaagtgttttaggtgatctttaggaagacaccctttaaggagtctgagagcctgagtatcccatataattatattccttctgtgggaatggaaaggattaatatactgtgactgttgttggaaagcaaggagtgataaactctctgtgttgtgcatctgtagcaagggaggtatacatgtacaaatacgtctgctacttgcagctcctttgtttacaattagactctgttatggatacaatttctataaaagaataaagagaaacataaaccctcagaagtaagaaaactgtgtctgatgtcactacgaactcacagctacagaaagtggtaacccctctattatttttcccaccactgactgagccttactgatttggggttccttgagtgttcagatattgaagactcccagctgtaggcataaggcagaagcagtgaagaagtagtatctggatattacttgatactacatttttgggaaataaagggaaaggaaagtgctttggactagacactgtctctcaatgttctaggttttctatttcgtgaaaaagagaaatgaattaaggtctattccagagagggcctgaggtatccctaattttgaaaagtcttagatcatggagtaaaatagaagtgaagcaatggacagcaatgaaggactagatttaaaaatgttttcaagacacataggggatcagcttccaacagcacagaatagcctagaagcactagactggccctgtctctagtcatcagggataggggcacgccctctggacaaaggcactgggaagactacaagttaaaggagttaagttgccaatgcagccaagttctataaagcatccttgggaaaaaaggtcaaccgctacagcaacaactacaaaacaatctgtcttatttcaagccgtgtgtgagagctactagtcaggcactgctctttttagcttcatctgtgcccagggagattaactctatctgtagcagcacttgagaaatgctatctgccatgtaggatctgtgtgggatgcagatgaaaagaccagtagagccctaacacagtagacatataacatggtccttggggttgaattattttattgaatggttttgttgtacctctccctgaagctttgcgtaaaagaggtgtttttaaaaatttaataagaggaaatgtttttaccatcttttcatttctaaaattcttgttgaggtaatgttgaccctagagccttttgttaaacatcgttatttgttttgatatgtttccttgttgcaaagctttttttatgaagcaagagttcagattaaagatgaacagaggatttactgcaactagaataaggcgctgaacaatgttcactagcattcacatttccaagctctactagtgatgtgaactatatttagaaaaaagacacggggtctctttttttctctgacagtacatgttttctgtcattcatgcagctatttggtggttatatagtacactgctttgctcttcaaacagaaactttaaatgctactattaatcaggaatatcatttgcatacttttagtctcaactaaaataatttccccaaacttgagtcttcagaagataatgaatgccctgaatgtcaattctatttatttgatatttaaaaaccatgtcctttctcagagcctccaggcacatgcataataacataatccacagaagtacttcaagcagataaatgtaccacacaaccagaattagcagtacacaaatgaatgacttatgttctacctgggtagagcagtacaaaatatgtcattcacatggtggtcaaacaggagtatactcacgttcacttagggagttacaaaaatgaggacctaccatccattccattcatccatccatccatccatccatccatccatccatccatccatccatcccatccatccatccatccatccatccatccatccatccatccatccaaccatccatccgtccacccacttatttactcaacaaatactaacagtatgtttgctatattctaagcactgttctggatgtgtcagtgaacaaaacatatgaaggtgccagtccttgtggggtttaccttctaagtggggaagacagataataattaataagcataataaataaagtatatagtctgttagaaggtgataagtgctgtgaaaaaagagaaagtgcagtggggggatcggaagtactggagtgtgtgtatggtgtggcaggtgcagtattaaatagcgtggttaggggaagtttcattcagaggagaagatttggacaaagatttaaagacagtggattggctgggcacagtgactcatgtctgtaatcccagaactttgggaggccgaggagggcagattgcctgagctcaggagttcgagactagcctgaacaacatggtgaaactctatcgctactaaaatacaaaaacccagccaggcatggtggtatgtgcctgtaatcccagctactcaggaggttaggttgaggcgcgagaattgcttgaacccaggaggcagaggatgcagtgtgttgagattgtgccactgcactccagcctgggtgacaaagcaaaactctgtctcaaaaaataaaaaagtaaaaaataaagacggtggattggctgtgttgagggtgaagatttcaagtagagagaacaactagagcaaaggccctcaggaaggagggtccagcatatgttcaagaaataacaaggagaccaatggggttggagcagtgtgtgtgcacagagaagagagggaaccaggggccagataagtgagggcttataagacctggcaaggattgcctttcaatctgagggaaatggggagtcagggtatgcatttgagcagagttgtgacatgatctggcttacatttcagcagaatcactttgactgctgtgttgagtaaagctaataggtcttttcagaggctgtggaagtaattcagaaggaaggggctagtggcttggataaggtactaaagtaaaggcagcaagaagtagttagattctgggtatcttgacggtagaccagcataatttcctgaaacacaaaataaaatcatccttgttctctaacatggatcaggaatctgtcagtttggtggttgcagctgtgtgtcatgggtctcagcttgaagaggactgtattcgttcatcgtgtgtgggaacatatgggtgactggcagggacaggcttgcagcagtctgtgctcagtgaggattccaggggcctggaaagactctgctcagagattcaaggaataatagatgagtatcagagagaatgggtgattctgaatgattttaaaatctggcactctgactgtgccctggccagtctcccatggaccatcccttaagatgaagaggtttcaattaaatagctgtatcatgaaacatttttggacattgagaacaaaaggagtaggcagaattagcaccagcaactttgtcagcaagaagagatggtgccatattgcagatattggtgccctcaacattgggcaccagcagttggcaatgatggccactttggcaggcttcagtggcattggcagaacattcagttggcattggctaaggtgcccttgatgggaagacactgggtatcatagccagagacacagacatcagtacctttgacacattgggcacctgcagctctgaagcagcccttggcattcattagtggcagatttggcaccttcagtgagtatgaagaggactgagagcacttttggtaggtcctggtggcactgtctcaagctgtggtgacagaagacatcaccacaataggctagagcaagagaggcagaaaagggcagatgtctcatggtcagcggtagtctagttaacagtgcacatgtgacaggagacactttgaatgaatcattagaaggaatttcagtaaggcctagaatatgcagagaagtgttgctctatgattgttgctgttatcctattttgaagccctggttggagttcctgaaaaccccttttatatttatagttaagggataatctaagaactattccactaccattggagtgagaacagcagtcacaacaaaaaatagcttgatctttaggaaaatgtttccagcctcatagtctgttgtatgtgcgtgtgtgtgcatgtgtgtgtgtgtgtgtgtatgtgtgtgtatgtgtgtttgtcagtctagaatttctaattatctcagacaatggagtgactaagaatcttcagctctatttatgggaatccccagtagagtcactcttacaatagttttagtagttattatttatttaattcaataagaatttttaggcactatagtgcatcatatgtataacatcattctagatattgtatatctaggacaatatatatataacatcatcctagatattatataaatgcaaaagggaataaagttcctaccttccaggaatatgtaatttccttgggtatacatttgaaatacatgcaaataaagttctgtgtcacttaacaacagggatacatcagaatgtgtccttaggtgattttgtcattgtgcgaacatcagacagtgtacttacgcaaacctagatggtatcacctgctaaccatctaagctattgctcctagtctataaacttgtccagcatgttactgtactgaaaactgtaggcaacttaacataaattactaggtgatggaaatttttcagctctattataatcttatgggacctcttatatatgtggttcatcactgacccaaatgttgttatatggcacatgactgtatacaaagataagtgccagtttttataagttctagaaaaaaatgctagagtggattggaaacatttgggtgaatttcttttatagtttctcttggggttaatatatggtgaagtaagtgattgtatgtgtgcttgtgtgtacatgtttgtcagagagagggatgcaggtgggaggggtggggggcagagagagagagagagagagacagagagagagaaagggagggtgaatatggacatccatttctctttattgtccctagtcctagtcctagtcctagcaggcacaggcagcatcctctgtctgaagtgactccttcaatgtcctagttggctaaaaacacctgttcattctttgagattcagttcaagcaccatccacctgcccaaaaagctttccctgatccccatgcatttagctcttctctcctcttgtagcattttccacatagtattctagtttttgacatatctatctctgtctaaaatgcaggcagaactccttgaggcagggaccaagtcttctccatgtttccattcccatctctggacttagcatagagctgaaatgaatagacagtctgattgaatggatggacaatgagcaatttgctaatgaatgtctgtgcatggccgtgtgggtgtttgcagacgttatgcctctggagttgctctagcttcctttcatctacctctgagcctgctgggtctcgggacacaaggtaattgttactttatgtctacatcacgtggcactcagaaaagtgatctggctgaagtgcatgataatgtaattgagtcccagaggtgacaggcagggaaattgatctctctatatttactgaaataatctcttgtacatctgtggggaaaatttcacattcaaaactttcttatgatacatttacctcttagtatttagaaaattgtaaatacaatcctttgccaccaagcagtagcttccaagtaaagaaggggttgagggttaaaactaatataatgcattgaagaaaaagcttttaacctgtcaggactctgtgattcataaattataaccttagaaatcatttaaagtgtatccatttagcacttataccttcatgaattcatggaacaacaagtaaagctaaaatgtatttcctcttgaagacatgaaagaggaatcttgcagtttcttgggtactcgtttcctttgataagggcagtagttatctattaactgaatgtctatttactaaaatacaaagcaatagacttgtgtgaaatagtaaaaatggccagtcattttttccccaagatgagtaaattgatgggtgattccacagagtacagagacggggcactccagtaataggaagtagaggaaagcagttaagggcatagactctggagccagcctggccagtttcaatcctgactctgacacttactagtggtgtgacctcaggcaagttacttaacttctttgagctttaatttcttcacctgcaaaatagggatttaattttgagatttaaatgtgttaatttagagttaatctgaagtacttagaatagtgcctggcacgtaggcaattttctatttaagtgattgctattaacataggggtttggcccagaatgtctttctggcatgctgaggaacatcttggggaacgtgtattctttagatagagttcactatggatccacagaagaccaaccatcaggctagaacccaaagccaaaggataggtggaaggactactggtttgaagtagaaaatctcattgattaccgcccctcctcatcccccacaaaaataaccacaaagaaataccacgtaatgaaacagtgcttagcttagggaaggaagaatagtaactatgtcacttgtttagcctgcttcattaagctcactataggtatttgtttgggtttgaaatatttgactcattatagcttgaaggacaaagtgatgaatgaaatttatagctggattgatggcactagctgtatttcagctgtaataaccagaggatggttattacgaatgagaaaaaatagcatctctatctgcctgttagctaaacatatgctttggatcactttttgcttggagtgtcatgagttatcacaaacttccacaacaaagaagttttcttttttaactttgatctatgtattatttgtttttttagagacagggtctcattctgctgtccagactggagtgcagtggtgggatcatagctctctgctctctaactgctgagcttaagcaaagctcctgagtagctaggagtataggtgtgtaccaccatgcctggctaattttttaatttttttggagagacagggtctcactatgttgcccagccttgtcttgaagtccttccctcacgcgatcctcctgccttggcctcccaaagtgctaggattacaggcataagccaacacgcccagccacaacaggtaagttttaaaggtacataggaatggctttttgattcatctgtctccttctccaggaacctactcctgattccctgaacagaagagaccttcccttttacttaacgtacaaaacttgttatttttactcctattatagcttgtttcatgttctgacttgtactatattaagatcatttgcatattggtctgacttcctttgctagactaaaatcttcttgaaggcagatactgtgtaatttcatcttatttttctccttgcactgtgtcttgggacataagtaaatgctcaattcatttgcagacataacttgaacagaaatatctcacttgaatgccattgatggaaaataagaaatatagccaaattctattcaacaattaagttagcacttatttcaattgtatggtaaaggcaggtgacaatgccttattcaaaatggcgaatatgctgttttacagttttcgtgtaaatgcacacagttctgcttttctgtgaaatcacaatgcctttagcaactaaatggaactacactgtcaagatctgactgctcagcttctcagttcacttccattccattctatgctatgtatatttatattgagtccttgcttctaagagatgcagacaggaagatctctctgtattaggcttattcatttaatctctctcttttttttttttttgttttttgagatggagtctcactctgttgcccaggctggagtgcagtggcgggatcttggctcactgcaagctccacctcccgggttcaagtgattctcccgcctcaggcacccaagtagctgaaactaaggtgcgcgccaccatgccaggctacttttgctatttttagtagagacggggtttcaacatattggccagggtggtcttgaactcctgacctcgtgatctgcctgcctcggcctcccaaagtgctgggattacaggtatgagccaccgtgctctgcccatttaatctcttaaatagggaggcatgagttatgactttaaacaccttctcttctagcttctgatggactaaacaataatctttaaatacatttcaaaattatcagtttagtagatgacaatcaaattggaaagttttgccagtttcttatctagaaaatgaataactgcactgtgagaaacccactagctcagagtagaatgttcactatgcaatgcagtcatgggcatttttagtcacggactctcttaggtcagtaattgagttcttttctgttacttcttggctccaggcaaaagcaacatcaaaaatgtattgatttttgttaatttagggagaatttattgaacaaatgcaagtggtcataactaatattgagttcctctaaatgtcagaaacttcatatgcatttttgtatttatatctcacaatgacctaatgtgataagttccactattatctattgttttatagataaggacactgggattagagaatttaagtaacttggccaaggtgacacaagcagtaggtggctaaactgggattaaattagatttaactaaaagctcaagagagttattttttgagcccctgcaagattgcaagttccttaaagatgacttaagtggattatttagcttactcatctcattatccccttagtatccttagggtgctttgaagtacagcgtttagacaatacagtggggtggttaagaacctctgttaagccgcctcagtatgaattctagtttatccacctaaaacagcattcacagattcccatcattttctgtccatttcttgcttaatagttctccatagcatttatcattacctgaaattatatagttttacttctttttttctgggtccctcactagaatttaagctgcacgaggacagtgaccttgtaagtcttgcttcctaacaccaaattctcaatagctagtacagtgcctggcatgcagtaagtggtttaaaaatatctattgaatgaataaataaaaggagatacattttgcttaccgtttatgcctggagtcgtaattttcaatacaattaatgggccaaatgaaccctaccttttttcttggttcagcttcaaaccttctttttaaaagtgtatttaatagacactaatatagcacatatgctttggaaaactccattttatgtgctttacaaatattgacccatttaattctacagagaaggtgaaatcattacatccattctaaaggtgaggaaccaggcacagaaagatttagaaacttgcccatggtcagacaattaggcaaagaatggagccaagattcaaactcggatagtctgaccatgttcccaaccattccattatgctgcttcctagattaatcccataaaaatgtcatttccctggagtttaatgctctaaagatgtgtctttgctctcttagagaatgaccttccatcttgcctatttttccttcctctctacccagattaagaaggaaaataaattaagattattttacttattgaaacagcacagtatgctatcagtgaagcttctctcaggctaccttcaaggataaataagtgaatgaccccggtggctgctggacagctcacatggcctatatctgcttttcttctttttcatatttgtctttttcttgtatttctagagctcttggattcctgctgcaacccttccttctagccttgagaagggagttcagtggtccatggaggctgcaaaaactgccttttaagcctgaaatgtaaaaggaaggccgattttataaatgattcctgttcttgcttttagtcaattggttctttcatttcctgtcccttttcagtttctttcacaaacacacaagcaactcacagccttgggtctctgatatagcaccatattcactcaggaggcaattgtcatgagcacagatatctgggatttagttccagttcagttactaaggagcaatcttccttggggcaagtcatttaataggactgggacttagtttcctcacctgtgaaatgactccagtgagaggaagagctggagatttaaaggtcccttccagctctaaactgtgattattctttgacgaattatgtaaggaagggaaagtgctcagatatctaaagccctatttctctcactacagattgcaggataactccaagggagccactgttctttattaaatgggggtgaacttctcagaattgaaggatgacggctgctggggatagcaatagatcagaacctattttcctgcctaattccttccctatttctctgtaaatatcagaaggagattaggagtaaaagtgatatttcagctctgtggtctacataataaacgattccaagataaattcttaaaaaaaaaaaaaacactaaaaagttctgcctctttagcttgggaagaatgtagtagccatcttgctttgtgaaactgcacaaaaaacttggagcagagcatgggtaagtatgtttgaattgcgtgctctcacgcccagcagttgtttaaaaatctatccagcccatacagttattgcgattttgcattttgtacatatggggctttgtcatttcaaagggtgcaaagagcttcatgaacaatggccattccttctctcgatgtgaccccgtagaacagactagttattggtcatcacttgtaaacaggaagcatgaatctcaccctaggaaatgcaggccgccagtgctgtcatgcttacatgaaggacatgccttatccctttgtaaaacatttaaaaataaaggcactcagtttggaaatatctttgagcatcctaacctgacccattcagaactgacctctaatcagcatttttgtttggctcagtccagtctaataaatattaactgggcattactatgttcatgatctgtgtgctccatacctaggaaaggaagatgaacatggccaagatcctaatcttgagtaagagacaaattagtcaacaggtggtttttatgaggtgtaatgggaacacagaagggttaaatcatctatcccagagagaagatgttgtaaagatttctccaaggcttaagtattaaggaatgaataggagttacccatgggaagaaggatgagagttaaggtacagaaggagatgatgtttctggcacagaatgactagattctcaggaattctatcacatattcctaggaagagagataatacttcttggcctaatttgcagtttaatgagggctatgaacctgaatcctggtgaatcaaatgtgatttaaagtaagtgatgcatttcctgtcctggcaatagaacatcccaagtgatcttctatgttcctctctaccctgctgtcatggcagcccacaaagaactccaggatggaagggtccatgatggaagaagccagggtccctgaattactggttggaggagagctgcctgacccacactggacttagcatgtgtgagaaataaatttaacagtgttaaaccactgagaatttggagctgtttgttacagtggctaggttcattaccctgatcatactgtgtgccaggctaaggaataataaaagggatctgaatgacttgctgtcacttcaacatttatatagcccaaataacttaggtttttgaccttaacattgattactctttcttcctttctcatccaatggcaccaatgatttctttcttaaaaaggtgatcttttacagtctttcagcaagtcaactgctcctcctgagtatattatcagcatcttgtgtcttttaatgacatttgtctattgtatataattatataacattatatctattattatatctattattgtataacatatataatatacaacaaaaaatgtattatcgtatatataatatatgttttatattatatatactatacatttgtattataaaatatatatcatattgtatataataggttataataggaatataatatgttaatgttatacaatatagcatgtatatataatgaaatatcatttcaaaggtatctctatataaaaatcaatttttctcattagaatacacattttatgagggcaagggcttcatctatattactcattactgtaaccctagtgctaagggaaatgactagtatatagtaagcactcacagttattttcagaatgaatgaataaagataaatataatagaatagaggctgggttttttaaaagaaatggacttcagctgtgttcagatgtaggcgttctgaaggcagaaagagctccaaacccagacgagggttgacagttgctcatatgaaggtgatagcagaagctatgcaggcaaatgaaggcgcctcaggagggtaagggaaggaagaagatgagagaattaaggctgaattttagggaatatcaatgtataaaatagactaagtataagcagctaatgaaacaatattagaaaaagtaaggaaagtaaagagagtattgcggcacagaaacagaactctgtaagaatcacagttttggggtcagatctgtgagtacagcatattcaataaacacctgtctattgattgaaataagtgctgaacactgaatagcatatagtcccatgaagatggtcaaaggggctgactccttttctaaaagacatatagccaatgtcatccctgttaattatacacatttctctgggatgacatcaggaggcttgggttaccctggggcctttcactagtctgataaagtaggctatatttctgatctgagttcttccctgtttagaagattctcagaagtatggaaaagttcttaatctagctggatatttattgataagttacgggtcagtaaactatgcctacagtctaagcctggtctattgcctgtttttttaaataaagttatttggaacacagccacactcattcatttctgaatcatctatggctattttcactctgcaacagggttgagtaaccacaatataggacatatggccagcagagtataaaatatttatgatatggcttttcacagaaaaagtttgccaacccctgagcactgagcatatctgttttgcacccccggcaaaaaaacaaaaaacaaaaatacaaaaagcaaaacaaaaaaaaccccacaagacattttcagaactgagtggagcttgtaagaaccctgggaataccacagcctgtcttactaaggactggacctataggaaatagaatattctgtgccttcggtgagactgggtcccgtcatgtatttactttaggttaggacctccatgctaacagtgcacgtatgtgggtgtgagattctctttgaccgtgtatctttaactgatgtccactgggtggtaggccaacactgagtggcagtgagtttaagacatgcaataaaaagaataaaaagaaatgcaagtgaaaagaatgagggtagatggagagtgagtgatgggatgggagaatgaaaataagtcgccctgtcaaaaggtaccatgagagcatctatgcctgtgggctatattttgtcattgcccttctgaaaaataccagaagaaataagaacaagtttctatcatttttctaagtgacagggaaataagactgaaccttcctttctagacttttaaagaaataacattggttgtacacttttccgctaaagcgtacacacatctgcgtcaaccatcaagcctagaatcaataaacatctgaatgttaaggacttagagagcactagcgtctttaagagaatgactctgttctcttgaagatgctagttctttcaaggtccttaaaattatcttcatagaatgtctctgttctcttaaagactctagttctttcaaggtccttaaaattcagatgtaacttctttgaaagaatgtcacattcctaatactcctttcaaaggctgaaataacctgtgatctcatcatattaagacatttctagagtgattctcttcatctatgacataggggtagcagagtgacacctataaccaaatctggcccccaatgctttgttttgttaacaaagtgtttatgaaagaaacccacagtttttttggggggtgaggaggggcaggacttctgctctccagtgtgccacagtttccaccactccatattgtcttttctttaaaagtgtttgagttttcaatccctacaatctctgcccacaccattttgagggggccaactgttgctttgatctattttcttcgttcaggcctaaaattaaatgaccacttgtaactttctagctatgttagtttattagaacccgttttatttgctaacattcttcaagttttgtccaatagagtttagtagactcactgacctaatatatatggtaaaatactcttttcagtaatgaggcaacaatgaagaataaatacattttaagaaactgtgctgttttatgggattactgatttgtgtatatcacttagatcagtgatgttcaggttatgaagtgattatgtacaatttgcaaatatctagtgtccctaacttctgtattatcttatatcatgctacattatacctaactctacagaccagagacatgtgcctcttttttgagtggcagtagcaaaggtggctcttaaatcatctgactgtgaacaatacagtcccaggaagatggcccaaggaaataaagggtgtttttttccttgtagtttttgacggattattccattttaactacaaatgtggacaatggaaactaggctgtaaagtagatcattataaaatgtacctggccaacttctaagatgtaccccaccctgcccgccctaccccatggtccccaccgtctggtattcacgcccttgtgtaaacacctctattatgtatgaactgaatctggtgacttgattgtaatgaatagaaaatggcaaaaagatgggatgtcacttgtgtgattaggtagcaaaagactgtgacttccatcttgctagcactttcttgtcttctcacttgcttgttctgttgaagctagctgcatgttgtgagatgctctatgtggtgacaaggaactaagggaggcctcagccaacagtgtgtgaggcactgaggcctcagtccgaaaatccctaagagcctgaatcctgcctacaaccatgtgagtgagttaggaagtagatcctcttgacttgagtcttgagacagctgtagctgtctgaaagatccagagacagaggacccaatcaacattgtacctggattcctgacccacagaaattgggagataataaatgttgttatatgccactaaaatttggggtaatttgttctttaacaatacagaatataaatcatctattggaataacagcaaaaatttttttagccaaagcctcaaactgaggatagagaagggggtaatttaatccattcattcagaggttctcagtgccattcagtgaaaaaaataaatatatgtagctccaataaatattggttaaactgagcagaactcagaagtaaagggccactaaaattcaggtgttcattatgtagtaaagtaacagtagcaatgaacaaaagtgaataccagacgtcgcactaagatcaagagtcctgtgataacaatatttactagtcatcaaatatttttgggtttgagttttgaggaactccaggatttaaccgaggagaatgagtaggcagagagacaacagcagagatgcagagagtaactacgtattgtggaagccgaaagaagacaatgttaatagtgaaaatttgccccatggggttaacaagaatccttgagcttgccttgcaagaagacagacgaagaaacagcttgttataattctctctgcttgcaacaaaactggctgactggctgaaactggctggaaccaataaggctgactggagtcagaatggcacagaatagactcgctctcctggggggtgacgttttgatgtcacagcctgaatttccacgtcatgtttcagaccagttccccatgaatttgcacaggcaacccacggaaaagcacgaagggacaactgcgcatgctcaacggactttccaaacttcccattcctttctgccaatcactaaccaaccgggaagccccgcccccagaatctctcccttaaatataccgctttaaggctggtacagggcgacggatttgaactggattcctgcctccttgcttggccgccttgcaataaacctttctctctacaaaatccagcgcttcagtgtttggccgcaattgtgtgcaggcaaatgaacccagtttggttgataacaataattgtcaatagtatcagagtctgctgaagtcaaagtagggtggagataacaaagggcttatggaatttctgatcttctgcttactggtgaccttagcactggttgtaggaggtcgcagcagagaaacaactcaagcccttgagggattagtggagcaaaggaaatggggagacgttgagtatagacaactactaagtaattccaaaaggtattataaaactggaaagcattagaagaagaaatattgaaaaacagcgtgagcatacaatataaaagttgcttatgtgctgaaatatactgtcaactcaggttgagggatatgaagagagcagatgcgatatgagccttgacacaaagtcctgcaaacctttaaaatgaaaatcctttgaatgcctgaccttcaggtgttatattatcaaaggacagaagcgtttatgcccttttaaaaaggaaaatgtattagaggattatccaaagacttggccacatacaattcttttctggaaaaaactaagttttatgttgaaaataagtaatcaggtaatatccctgtgtccaaagagacagaaaaagcacaataaacttaacatttctaggacagtagaaaaaaagccattttcttgtggaactttgggtttgtttcctttcataaaaagggaaaaaggtgaaatttgatcttcaagaagtccaggaaagcttttagagctgagaaaagacagagttggggttggtgagggaagtagactctgggtgaaaacggataattaagctttacaaaaggtcaagcattgcaaaagacagcgagaaagatgcattctatgtgttgaatgtatcaaatgtagttgagaagatgtaaatcttcgcattggtgaatatttcagtattaaaaaagacatattaaagaatagctattcttacaaaaggaataaacttttttctttgaagcttgacacaacatatacaaataaaagcatgaaaaatatgctttgaagtgtgctaacacatcaagattgtactgagcaaagcaccttttctctgtttaggaacaatctcactaattccacaacacaatatgttaattaaaggatcccaggtagcaatcatggaatatttcttctcatgacagatgaagaatacaaatattctgaagactgaaattgtataaacaaaatgaagagacattttgtccgttttctggcagtgcaaagttaaagtgaatgcagatgaatgtgctggcaataaaatgacactattaaccatctgaagatcgggctcattacctaagaaggcaaagcatcaatttgtggcattacaacattctatttgtgctgctcaatgtgcgtctggatgtttttatatactctctactaatttgtgtgcagagtgagctcttctgcatcagcctctctatagaagcttaattttgtattgtttctcttatattattttctctaatgagaatgatattctgtattagaaataaacacttcatttattcttcaaataattctacgttcagtttctcttgttttgcattatcaagtggtgtgtacaggattacagatatatcttaaaattgaggtgctctgattaaaaatatacatttgaatgacatgtgaggaaaatattcattcactcagtcactcactcattcattcttaaaagaatgtctatgtattgggttaagcatcatgggaaattcaaggatgttgcactgtctctgccctcaggatgtttatagcatagaagtggctgaatgttattagtaccttgagataggaacaaggacagggccataaaatctcagaggaaagggaaggtcagtgtattttctcataccacaagtattacttgggtacctactatgtgacaggtgctattctagaggctggatatatagaaaagagaataagacagtcaaggtccctgaccttatggaccttgcttcctgagggtgagatggaaaataatgaagaaaaaaagcaaataaataatataacttcagatcacactaagtggcatgaagaaaaataaagcagagcaatagcaagaacagtgatggtaagggaaggatgtgaattttagctcatgaaggcccctgtgaagatgtcacattcgaatagagatttgacaatgtataggagcaagtgtatgaagttctgaaggaagggctttctaggtagtgggacctttgtaggacaggataaagactttattctaagtgggaaggaaattcactggagaattgaagcagggtatagcatgacctgatttatattttagaaggatcattccagatactgtatagaaattcaattatagaggggtaagaaggtaacctggacagaggttaagcatctgtgaatagtccaggatagaggagaacaatgagaacttgattcatgtagtctaaccaaggatgacagactggaatgcactgtggtagtccatctagatagaggtggttggtgaggactaggttgataattacttagatggtaaggagcggttccattttgaaggaagttgcacaaaggaagtgatatgatatgataatatctgagttgaactttaaatgaatggcagcatgtgacaaagcaagtagtcattcatggatttgttgagtgcttatctatttttatgaaccaggcactgtgctaggtgctatagatacagcagtatggaagccattgctgaaagtgagaacaacaaaacttgctgagaaggtaatattttaagtaaacatacacaagcagagaggtgaacaatatgctcataggaattacttcctgaattggttctaaggatgttttattcttttccatttagtgtagaaaattatgtgattaaactcctttgtatatttggctcagtgaatttgcaaaaggagtaagtgtctatcagtagaaattcaattcactgtcagttgggaaatttcatcagacaatttccttagaaatagtggctaatatttacttttcccacttagggagggagaaagtatagcctctctagaaagaataggaggataggagagtacaaaacctaggacaatctcaaatatccaggtgtatctattacagttcatctgccacctgcctccaatctgccccacagtctttttgcaaacagatgacccaacttcaactttccctccttctaatcccacttgtacactgcctctagaattaactggcctaaagtagtccagtcatgtccattccccagtgcctacagaataaatttcaaattcctcagcctgacacacactgacccaacctactttttctgctttatctctgactacacacttctcaattgttttaatcaccttgaattttcttcctctttttaaaattattttttgaattgcatgaatatgttatgaaatacacataacataaaacttaccatcatcgccatttttaggtgtatatttcagtggcatgaagtacatttgcattgttgtacaaatcccattggattttaaatgtctatttccctcatacttccagcaatttgttgcctgaaccaaatttgtttttatatggttcctggggcctcctgaaatgccttttcccatccaagtactaaccagacccgaacttgcttagcttccgagatcagacgagatcgggcacgttcaggttggtatggccatagatctgaaatgcattttcctttccttatcaattaaaatcccacatatctgaaagattcatgctcagattttgcctcttcctttaggctactttgacaccttatctggaaacaggaggtcaactctgttgctaggtaacacactgcttacagtaaaaatgatgcctggttggtaaattgcatctggactaggagggcctatacatgaactataaatacatgatggggatgtgatactttggacttccctgagtaatgactcgtgtaattaggtcccttgtagggaccatggaggataagtctatggagttgttgcaggagatatcgtctcttatggggcaggaggcttttaagccagggccattcctgcacccacccaatatgaatctagtcttcttgaacctgagctgccacctggggggccagaactgatatttgtactgatattaggactctcactgaagagaaaatctgaagcttccctggtggccagcagtgttttctgtatcacatttttctaggtaaatctcaagctaagggttcatgcctgtaatcccagaagtctggaaggccgaggtgggtggatcacctgaagtcaggagttcaagaccagcctggccaacatggcaaaatcccatctctactaaaaatacatacacacacaaaaattagccaggcatggtggtgtgtacccataaccccagctactcaggaagatgaagcaggagaattgcttgaacccaggaggtggaagttgcagtgagcctagatcataccattgcactccagactgggtgacagagagagaccttgtctcaaaacaaaaaaacaataaaacctcaagccaagtgtggcccatagtagtctcataagtctgaatgtgcagttggacctaagaagatctgctcttgaggttgcatcaatatgtagaactactgtactaaatacaaatactccttgcatgcctggactcaaaatcactgggaaccgtacacaggactagggcaataaaagtattgctcacctttggaaggagctggattgcctgtagaattctttgtctgtgcccagaattaaggattccaatttccaacaaatcctgatcttccataacattgcttccctgaaacaaaacagaaatgttacaagttaaatcaagcatttatactgtggataaataacaaggatttatttaatacagagaaaaccagtgagtgacctgatttttatgaacaaagacatagagtcattcttccgtgagggtgagggcagagtcggtcaccttgttactgatgtgaagtctaggagaaagctcccctcccctcacaaatatctatcgtggcttatatccacatggggttatctgcactggagattcattcgtgtgacttaaaactttgtttctgcacattgtgcacatgtaccctaaaacttaaagtataataataataaaataaaaataaataaataaaaaaagatccaaaaaaaaaaactttgtttctgtaaaaatgtgaatgcttctagtaagagttgccatttaagattatcagtgacttacacattgatatgaatgaatcatttttccccccttgatgacagattttgtgcggaaggctgatagaaaaattgacatatattaggcaggttaaaagtgagagttaatacttaatttcaaaatattgagtcacaatagcaaacacatagaatcaacctaaatgcccatcagtgatagcctagataaagaaaatgtggtacatatacaccatggaatactgtgcagccatagaaaagaatgagatcatgtcatttgcagggacatggatggagctggaggtcattatccttagcaaactaatgcaggaacagaaaaccaaacaccacatgttctcgcttataagtaggagctaaatgatgagaacacacggacgtagaggggaataatacacgctggcgcctgttggagggtggaggatggaggagggagaggatcaggaaaaataactcatcagtactaggcttaacacctgggtgatgaaataatctgtacaacaaagccccatgacacaagtttacctacgtaacaaactgcatgtgtactcttgaacataaaataaaagttaaaaaaattattgaatgccagacaccagatcacgatatgaagattgaatgatgaatatgatgcagggccctacccacaactgcctttattccttccagtcccgtgatggaaagggactgttcaaaggcagttaggtaggatgctgagactgtgctatgatggtgacacttgcttaggagtccagagggaatccagggtattttttcagagaaaaggacatctaatcagatataggaaaaatgggtggttaaggcatagcacctaaaagaggaaggacaatggggaaattatgtgcaaagacctgtgagtaagaaggaatgtagtatacttggaagcatcatgttctgggataatatggagagaggagcaaacggtaaggctgaatgagtaagcagagggcagaccatacagatattgcatgccatgctgagggcttcagactttatcctgaccataatgggtagccatggacagcttttaagaaagagagttacatgctgagattccaaatttagaaacattattttgatttctggggctgggcctcagtttccctacctataaaatgataaagttgagcccacaatgtccaaggaccagttcagtcctaaaattctgatttcaatggttattttaaacctgtgattaatatttgaatgcagaagtttacatattgctcattttatccctagattttaatctttcacggtttgtaagacagagtttctctttaaattgaggcgtctatagaggttcaagaattcagatcactattttttttgacaaatcaaactctgtcctacttatgtgtaacacaaaaacgcaagaatagaaatgacagaatatccatttatttagtgatgagtaccattagacactcaaagcaaaggagaatgaatttgaaagggtgattctggggcatggagaccactgtggttgttttctagaggcgctgtgggcatagactaacgtagtagtcacaggagcaaaaagaagcaggtggatttgcaaactatcaggaagtttgacgtggagattgaacatgtggaatgatgcagaaatgtggaatacacaaaaattcaaggcttgggcagtgagtggaacttgatgccttttcctgccataataaaggaggaagaacagccctggtggggcgcaaagtgagactaacatctttccctggacagggacagaatagatgcatgtaaacaacttaataatatcagactatgctataaatggataactggctgtgcttagaaggattaaagccactggaatggcacaacagctagggatttaaaacgggcattcactggacaaaagcattccacctactcatagtgtcattcttatgcttaagcaacaccagccatctcggaggaagcagaatgatccaggtattcagcagcatgataatgaaaagcctaatgaaaaacaaataaagccagtcttggcaacatgccacaggaaatattgctctcaagaaattactcagtgcacacaacagagcatggctgagaatacaaatgacttcatttagagaaagcgttattatttccagaaatggactagtatggcatgagcgagatatgtgataccattctgacttttactctttgaggagttacctggcccttaagaaaaaatctttcgtcatctttgtgctagaacattaccaggttttccaggtcctaacttaccaacccacaacttcagcccatgtagaatagaggacctggtttttttgcagaaacagaaagcatacgaatatcccatagtgtgcatagctactatctctaggtaatcctgacaactggatttcagtgtttgaatactgaaatgttttggtaaattaaatcctaaagatcactgttcttcctctacacctccaatatgctattttctgtatctcagtaagagaggagtccttttgaagaattatagggaagttagatatttttaaagaaggtgttgagtacataagaacatctttttgagccaaatttcctagcatataggataattgccaaacatttttgaaaaatgaaccaaaattatgggaagcacaagaaaaatagtgaaaatgtgtcaaaggggaaatggcactaattgggaaatggaaaggaaaggatttactgtccccagtgaggcatgctgttagaaattttctattttatctttttctataatacatagggatgccaaaaatatcctagtacatcattcagccagccttttgtccaaacactaggggacttggagtctgcagaactgggtttggatcatggcggggcaaacttggctaagtcatacattctttgtaggcttcctggtcctcacccaccaaatgaagcagtttaatgaatatgtattcagtttcaaaatgctatgatttcagccatgtttgatttttggttggtatcattatatataaatatagattgtatattttgaaattatgtttcagtgtttcagaatttgtaacctaaaattagctttaagaagtgattaaagagaaattcaagaatatatatttttttttgacaaatcaatcttggtatgatggacttataaaatttcttattaaaggaaattataaggtaacttatttttgtagtagtacggattcttatagcttttcagggaaaaacaaaatgtttcaaaccttataactatctaaccatttctttggcacctgggtgacagttgtgccatcaaagacaataaacattcccattcttcctagggagctggaattaattctcactttatcacttgcctttactaaatgctagcaaatctcagtttaacttctgttttttttttttttttttttttttgagatggagtttcactgttgttgcccaggctggagtgcaatggcacgatcctggctcactgcaacctctgtctcctgtgttccagtgattctcatgcctcagcctcccaagtagctgggattacaggtgcccgtcaccatgcctggctaacagggtttcatcatgttggccagggtggtctcgaactcctgacctcaggtgatccatctgcctcggcctcccaaagtgctgggattacaggcgtgagcaaccgctcatttttctcaataaaaactgaacacaactctagctttcttcctcctccatcatttttttttttcacataacttttaggtcaatgatttgggggcagagctccgtcatgtccatcttctgtttagtcatctactacactgcactctcaatctcctttcctacccagtacactccagtcccatgttttcatctcccattttcctcctcaacccaccagaataagctgttcccccccatcaactccatagaacttctctgtcaaatgttaagaatgacccctcaattgccaaatatagttgattcttttaaatcttgatttcaagaatttacttgccatatgtaggtgatggccaccatattggacaacaaagatacagaacatcgccatcattgtagcaagttccattagacagtgctactctacagttagagacattgaaactttagtcaaatcacaaaaatggggcagtagcagggaatcaaatcagggactcaaaaatactcatgagtttttctcaggatgtagttattcatgtgcctcttagtcaaagttcatgaacattaagtttaggatctttagcaaattctcttttaattcttcagtcaccaaaagaaattagaaggttgttctactttcagcaacatttctttatggtggggctataaatctatgctatgaaaatgacaagtccaatcactaaattatttttgactttcttagcatccaccaatcacactgcataaggtgtttaaataacaataatcaataaataaagttgtttagttaatgactttctagaatgatcaaagacccaaatgcagtatttttagaatagctgttctttgcctgtcaagaaatgtctaatgcagggtgtctttattgatctcttaaatcatggaatggaaaaagtcacctaatgttttatgcactaatagctgaaagtggaagtttctttgaccacggggagaatatcttaggtactgaacttcttcagctgtgataaactgttaggatgcccaaatagaatgaaaagcagtgttttgtatttaattattcattagaagtaaaacagctatttaccaaaaacatctcaaaaatatctgtactgatggctctgtctctccaaactctgcatttaaaatttcttgtagttttttaaacttaatacgatatcttattcatttagcaagctttccttcatattatatattgtagaaaatgttaggaaaatatatttaaggaccacagggaactggcttattcttaatataaacttgagttggataatgttatttattctcttccttcatccagtccaagactaaaaaaatcaagatgatactgttgattggggaaacttgtttttgctctataattagctaaattagattcttctccacaatttatgtgaccttaaatatttaaaatagaatcactgtataatagaatgacagcaagatcttacaaacttacacatagaaaaacatgtactttagtttgcttttaatatttagccttttataacataaatagcatggtagcatgaaactgtacataattttcttggaataacaatgctacctctctgcttctataaaagctttgagtcaatttgatatcaatttacaagtaaacccaatgcatgtcttctctgcatgattatgataatggttattgtgctaaataccagatttattattcctctgtcagtgttggaacaaagctttatttagcttatcatatagaaacacgggtgactataactgatcagataatggatgatgtgcttcttccaactttaacttcctctctcacattaatgaaatggcagtggaagaaaattctatagtacactaaaaaatccctctaccctaatcctccatttaaacatattctgtctaccgcaataaaatttcttgcatacaacttaagtaaattttcatgtttttagcttatgaagaaagctttctggattcttcagactatgtggactattgattcaaaaaatattacatcactgaccaataagacatcatcttatatgtgcaagctgtgtattttaataaattatatcttaaggttaagatatagtttagcattatatatttaacagctaccatgattacaatgaattttctgtcaccgattttttcctctttatttttgaaacccaattcccctttgaaacatctgttgtcaagctacagagaaagagaaggaatttaagtaaccaggtatttatttgttaaagtatcgagcaggatttggtgatatcataaattataaatgtaattcacttgagatgtgttcatgtaggttttagaattatgtgtatttgtaaaagagtgcaaaataatttatacagtaatttgtactgcctttggtcaaaaattttatagctatgagagaaggagcctattcttcatttttaaggatgctaacccagagctccttcaagtaagaagaaaagttgatgtgaacaaaacttttttgtatgctcttacttctctccagatgcatatatctgtataaatataaagctgatgaatacctactgtcttccttcaactttcacactgatagcagttggtgttcattagtgtaaagtaaatagcacacttactgtgtcaggcactgttctaaataccttccatatattactttatttaattctcacaataactcctatgaggtaggtagcttgttcccatagctgataggagactttctcaagacttaccctatactacctctagcaggaatcatgcaggagataaaaggttgagttaaaaaaacatggttagatccacaccatttatatttttacttcagagtcatctgaaattcacatttgaaagcgagtgttccaatgcatttatgtttgatttcacagtaccgaagcaacaatgaaccctctctatggaagagaacttggagagctgtctggcctaatcttccctgctttgctccagtcctttctgttcactgaatcctggaatcaggcttggcagggacctggggggtttctagtttctagtctaaacgttccctaactacccacaaagcttcaacttctcttttgaagtgtggtgtctcactgggttgacaccatccccagagaggtagggaggatattaaatgctttaaatggtctttcccagcagctgagtctgagcagggggtgcggctggggttggggtggcacctctgtcctactcttttagctcccactgtggtacagaccaagtgttgcaggagagctatctgaagaagaacgtgccagaagcggagatgaaaggaaaacagttagcagctgtcctgtgtccttttgtaatcacaagctgtgaagctgaaaaaaaaaaaaaaaaaaaacttccttgggtaggctgtacataatcttggcagatatctgagtgttgttcttctgtctaatatgctgaacgtttcccagtgcctcacaagagaaaagtgagacagggttaggtgagtttggacaccttgctccgaacaggcagggaacatggcgcccttgtacgttcatcaagctcttgcaaatgccctgtcactgtagatgctgatgcagagctccaaaaggaagggctcctctgcaggagaagcaaaaagaatttgctcctgggtattcccaacacagccacatataatgacgcagaaagaagtacctaaaaagattaccagccattacattcactgtgtagcaggtacttcacccaccttatttataaaccttacagcactcttgtaacataggtggtattattttcatcttatagaggaggaaactgagtctcagagatgtgacactatggagtcaagttcacaagataagtataggatggatctgggatctgtgttttatttggtcagactctgatgctgatgcttccttcactacataaaaagaaccaaatgtttagtaggggacattttctggatggagattccggtccatagatatgtaacgttaccaagaagttactcccatgaccctattttcacacacacaagcttacatctatatttacagaccatagggagtgactgccagagtttctccaacacattgaatttcacataaattatttatcttctgaaaggtcaactggttagttctccttctaaactaccttagtgtattccagaaccaaacatgttaatcaaagtgacccaaggtgtttgtggctaaagcactaactaacttgccatgtttcctgctgtgaggcaggaagtatcagcatggcattaggttgttgtgagagattcagctcttctgcagtgccttgtcaaacgacctgactggtcaactgggaaaatgaagttctcagggccaacatcgtatttgggtgtttttcttttaggtctgtatcaaagccagatttaagaaggagggtgtctacaaatgaacgaaagcagaggatgtctggggacaagctaaggacatttgtgtcccacactgcatgtattctgaatccagagaaaagagagtgagttgcagtctcctgagaaggctatccaggctaaggagcctgtgatggtgaaggtggataatttagccctctgagaagtgtagacctgtcaaaaaggagattcgttaattcttcaaagatatggttgtcttcaaagaacagacatccccagatttaaggatgatggggtctcttgacactgagaactacattcagaaatagccaaacaagaggaaaggagcaaagaggaagagaaagggagggaggaaatgagaggaagtgtttattcttaagggtgaaggtagtggtgaagggagtagaatttcctgataaaatacagaaattcaaatttaagtggcatcatgtatttttattcacttaatctggctgccttagacaggaggtcactgaaatctggaaatgagctggcagagtccagtccagagctaccactgaggcaggcattgtcattcattcatgtagtcagcatttgtttgttcaataaatattttttgagcatttattatgtgccaggcactgggctgtggttgtgagatacaatgagatcaggacagacaaggtccctctacctttagaatttacagtctagtggagaaaaagggaaacagtggaataaaaaaatagataaataattatttagcaaagttttactatataccaagtatttactgtattagtagggactattaagcactttgtcttgtttgttgttcatgataaattctgatgttagtatatacaattattatccttatttacagataatagactaagaattgaaggcacagaaaagctgataattagtctaaggtcacacaggtagtaaaactgacataaagggaatcaatggagttctaaaataaaaaataaacaaataaataacaacggagatctatgttagaaagactggtgaggaaagtctctctgagaaagtgacatgtaattaagacctgaggggattagaaggagcagcctaactgtgagaagagctgttacaaggacattccaggcagaaataacagcaggtgcaaaggcactgaggtgaggaaaaaggtgaggcatgttttaggaacaaacagaagcctactaagaataaaatttagtgactgagggggacgaagacctgggaaagaaacgcaggaaataagacaatacagagacttgcagactctgataaggactttgattgtattccaagtgcaatgggaaacattgaaggaaatatactaatttgcatcttcaaatatactctggattcggtgtggagaatggatggagaaattgggaggtatggaagttgagctcgacaatcaaaattgaaataacagcctagaaacataaataatctaaaggaaatgtgatgaaatatgaccttttgggagactatgggaatgggtctcactggggggggggtcaagtctccaagccaaatgcatcttttatttgaatcaaagagaaaagccatatgacaaggatgaaatcagaatagtctttgataaaggttctatgtggatacaactatgaataaagatttagcagtacctacgaaaatgaaaatgttcagactccatggacccagcaattctgtttcttggtcgtggcagacattgctgggaggctgagtcctttccctctcactacctcccactgcagaggctggataagctaaagttctcagcttccctttaaagcaatggttgaacatgtgacagaagttgtcattggggaacttctggaaaagcttttgctttcctaatgaaaagggaaaaattcacctgctacccttctgtgcccataagaaaggactctcctcaggatgagtggctaaacagttcagagaaggtgacagcgatgggcccacagtccttggacctccaatgatagatatctccattggatacctggaggcaggcaaggataggccatggaagggttagttctgcataaaaaacgttatttaaagctctctccatcttttgcatctaagttgctctgactagtgtttatctgtcagtgaaaataatgatggggatgtgtactgtggcatgtaattaatagaggttataatggaggcaacaggatatttactatttattttaggcagacaggggtatgataacataaagaatagcagagaagggatactaggaagaatgaaagttatcagatccaagttggggtgtgtgtgtttgtgtgtcaattatagcattgcctcttctcattttgacttaacgttgtgaatttctcataaaaagatgacttgaaggaatttctttactctggattttggtttctattaaaaactaaaacggatgcaaaattgccaaagtgctcatgggactaacaggttctaaatctgggagtgggtttcagcttataattgaagatgacaggtgtccagagattgtatgaagttatggttctaaaggaagtacagttttacataaacctggtattctacaggaaaaaatgttactcttgaaatccaaacacattataatcataacagggcagaaacaataagaacatttaggggtatgttaggttgaccttagtgtgtagctcttccaggaactcttgagaagtcagagtttttatttaggtcctttgtaatctggaatgcctttggtgggcagtgaatggcgattattgaaagagttgactgatagaatattcctgacttttccccacatttatttttagttttggttttggtcttgaagacatttttcttaagatgtcttcaggaaaaaaaaaaatttttccacattgaaaactttgttttggctttttcgagtttaaaattcggtgatgggaaaacttgctcacatcacaacaatgggattaagtgtgaggagatgatcgctgtgggcagacaggcaggaggctaaccccacgaagggctaaactaaaagctgagtaagagctccactaagaagagctctttgaactgttctgggactggctagggccactaattgtccttgggttgtatatgaagggaaaatttgtatcagggacacaaatatccttgtcctttgtatagcatctatatcatgaaggatattctcattttttaactccattttcttcactgaataatattactcaacctgaaagaaatacaggggaaagaaacggagggacatgcattctcacagtgaatgtaattaaatgtcctcctgtctagtttttcaagttaaaggttctgagttttgtttccagaatattcaactggtactaaaagcatcatgaagtccctcatatttaattaaatggtgcattattaaaagggggcacactctatctaggttaaagaggtgataaacagctatagaatttcatgtttctttctacttggtattatatgtcttgtttcctttactggacagcaaacttcttgggagaaaggatcatgcctgaagcatctttgcatctcccctaacatctgtttgctaagtgttgaataaaataaaagcttgaaagaatgaatctgtaagtaaaaacatgagttttttagatttattaaaaaacatttagtctaaagatcactaagtaagtttataggaaaagcactgaaattttgagctggaaattctaatatgcaggatgcctgatgtgtttttcccccctaattgaaagaaagataaagatggaattgctggtacaccataacaccaaaatgttcttaatttttttttcagttttgcaaattctcatgatttgattttcatccaggactgtcagttgagacatctgataatctaaaagcattcagagaattaggatcccatatggctcgaaaatatttcctatccggcaggaaaaagagaacataccatgaaaataatactggtatatccttcaatttatgtgtacaaggagcataaataaatttaaatcattattcaaagtataataattataatgatcataaggttgattataacaaccaaaataaaaagaatatacagttcttcataatcatgtgacattataaaaaatcagaagtatacttcaaatcaatgatagtaatagagttgtgtttgtctaacagaagcaacagtcattagaaatgagcacgggattaggagtcctggcttatcactaattaactgtataaatctgaaaaggtaatttaactcccttaggtcttaattttctcaactgagccatgaaagggctagaccagatgttcccttttaacacggcatctgttctggaggttctaacaaggagtacatctactcatacactcctattgcctgaagaataattaattcttcttgctttgggggaaatgtcattttcttcagataagtgttcagtattgagaggtgcacttacataatggtgagggagcaaggagacctgggcttagtcatctaatttcaccaacaaaattattactaacaataacaataacggctattcattgagagttaactgcaggccagacactgtgcttttatcctctgaacaattctataaaatagatatcgctattatcatccccattttacagatgagaaaatggaagcataaagattactaggaacttggctgagatcacacagtaagtggcagagctgctttggaaatgaagatgggtgttggaatcaaattcccctcaccccactggcttcccatagctttgacaagtgtcttctgcatggaattgcctcagagatctgatggatggagtctttctctgccagcccagtcgtctccatgaacctcctttcctacaatttctacccagggattgaggattattaataaaaagaaaaggaattgagtgctcctgggttcaccttacagctctgcactttaatagcagtgtgactcaggatcagcaatcctctttctttgtccgtacaatggggataacactaatgcttatcttttaaggatatggtgacataatgtttatgaagttgctttataaactctaaagtaaaattgctaaaaataaagcatgcctgctaggaactactttttttttttttttttttttttttttttttttttttttttagaacatagcactgtaaatcttctagtttcatgttgtttttgctggaaatagtctattctgaaagaggcagcatgtgtgatggcagaaaaattcagggttcccccccccacccccagctctgccatttacttagctttgtggccttgggaaagtcacttgatctggcatcccacagggtcccatactctacaggccctgcatttggggtttaatttctgtggttgctgttttgaagttcttcctaatttttttctttgagtttgtgtgttataagtgaagtctgaagggacaacggagcatgcgctgggcttggcaccttagatcatgggaggtcttgcttcctgctgcatctccaggatgggttctgccagagaccctcttcattggtctctctatctttagtcctgcccaacctccctttctctgttgagtcctaaaattgctgccatccttcactcctagcaggagtctgggtgccggcagagggagggcttgggtgggtcactcaaacccatggcaccttggggccgagcatggcatcgcccatccctgccctaacaggtagcagcattccaaatcaaatgggtgaccagccagaagctatcccaatccagatatcaagcatgtcctgatgaagagatttaaaaatcctttgcggggtgggggtcccctgtctgctatggatggaggtaatgtggcactggataaaagagatgcctggttagattttctgggaccctgctctatccaggacactgtggtagtcaggagagtgttgggggcctggcagtggggcacctgtgccctgcataggaggcacggtccagggtgcttgcatggggctgcactctcactacaagtgtcttgtgccttggaatgctcctttggctagctccatgcctggagcattctccctccttctaaccgtcctgggtttggcctgtatttgtcttttttgaccagatcaaggcatcctttggataaaaacacaaaatataaactggggaatttggtattccttcataggagttaaatgctttaatattttcatctaaaagtaacattgcacaatataaaaatgaatgacaaaattcatgctaataacataaaattttaatgtttctttacacagaacattaaatagtaaacaaaaaacaccatgacaagtctaaagagagaccacaaaaggaaggaaaaaggtttgtacgtatttttaatggcactctttcccctgccttttgaatagggggccccacattttcattttggactgagctccacagattatgtagctggctgcgctcccaggatgtaaggtttgcataatcacctggtccttgcttcacttcacaggtatatttgcagcagctctgcttgtagttggtaagctcagttaagcaacatagttggactgacttaagaatagcttaccatccaatgatctgtggctttatctttacctttccaagtgggtagaaaaggagtaatgggagccattcccttggaaactactgaggtcatttaaccctaacaaggatgatgcttcactagatgttaattagagatcatttccatttttagttttagttctagaggttgccttaaaaattatgagggcaacaggaaacactgaacttgcctagacttctggggcttctttattcattgacttattcattcacccattcaatcattccctccttcactcacactatcatttcacaacatttactgaagtgctatcatgctgcccacactttaagtatggagaattcaaaagtgattgaggcagtctctctcctaaagaagctcaaagtcactgggggaggggtaaggtggaggtgggatcagaaggcatataaagagattatttttattattgttttgagacagagtcttgctatgtcacccaggctggagtgcagtggcatgatcttggctcattgcaacctccaccctccaggttccagtgattctcctgcttcagcctcctgaatagctgggattacaggcacatgccatcacgcccagctaagttttgtatttttagtaaagattgggttttgccatgttggccacgctggtctcaaactcctgacctcaaatgatccacccgcctcagactcctaaagtgctgggattacaggcgtcagccactgtgcctggtcaaagagactatttttttgatgcagcacatacaatgattatggctgtacagagaaaagattcctgaagtacacagctttggatcaggaaagacattttgggaagcggaacatctctgctacctgctaaatgatgaggaaaagttaaccagaatacaggcaatgcttgaagcaagagagagaaggcactgcgtggatcggttgcagcatgaacaagggcaatgagaaaagaaacggtatagtgagagtgaaaaccagaaagcagtttacagttaaccaggtggaagaaacagggagggagagaccaggtagccagccttgtaagcgatgatgtgaagtgggcttcatcctgtggttctgggcagttggcaagttgttttatgcctggaagggagatggctggatttacaatgtagagagcaaactccagtggctatctgaagtgtggatttgaagggctaaaactggaggttggaagcccatttaaagagctcttgcagccataatacaagagacaatgaagatctggactaggacagcagcagcaggaatggtgatgtattaaagaaatactatagagccaaaactgactgaacttgattattgattaaatataggtattggtagaagacaagtgttaagaataactgtcagcgctcttgtttgggtaactgatggttaaggagtcaggtgagaaatagactttcagaggaggtagagggtttggaggtacagtgttttgttcttgtttttgagacagagtctcactctattacccaggctggagtgcaatggcatgatctcggctcactgcaacctccacctcccgggttcaagcaattattgtgcctcagcctactgaatagctgggattatggatgtgagccaccatgcccagctaatttttgtatttttagtaaagacagggtttcaccatgttgtccaggctggtcttgaactcctgatctcaggtgatccacccacctcagcctcccaaggtgctgggattacaggtatgagcccctgcgctcagccttgaggggctgtgttctgtttgggacatgcttaggggcctgtggaactggaaggaggggatgttagcagacagtgagaggaggctgaagtttggggagaggttcaggctaatgttgtagatttggggatgatcagggctgaggtggtagctgtatgaaatggataaatgcagcactgagaagaaaggggaaatgccatgagagaaagaaggaaaagatgaagttaatgaggaaaagagggagagtgtgtcgtgtcagatgccaagagggtaacgagtttcatgaataaggatatgaaccaactgttaaatatggcagagaagtcttaatggaagtggaaaaggccctttggtttggtaaaatacagcagctcatgaggaccccaggaggagttttccattatgggtacaaaagccagattagaggattgtgagacaaaaggggtggagacaatgaatgtagacgattgttttgagaaatctgaatgagtaagggaggagaaaatgtgcagcacagctggagaaggaacaggatcacaggaagttgctttattttcttcttcttcttcttcttctttttttcactcgtaagaataggaggtgactgggtgcactgggtcatgcccgtaatcccagctttttgggaggctaagataggcagattgcttgagcccatgagttcgagaacagcctaggcaacataggaaaaccccatctctacaaaaaataaaaaagttagctgggcatggtggcatgcacctgtagtcccggctactccgggggctgatgtgggaacatcatttgatcctgggaggcagaggttgcagtaaactgtgatcataccactgcactccaggttgggtgacagagtaagatcctgtctcaaaaaataaaaaactaaaaagaataggagactcttagctgggcatggtggttcacactgtagtggtggccacctgggaggctgagatgggagggaaaattttttgaggtcaggaggttgaagctgcagtgagctatgatcacatcactgcaccccaacctaggcgaccgatagatatgtgttttgaaaacataacgctcagagcaggttgaaaccctgtctcttaaaacaataattgaaaaaaaaaaggagacacttaagcaagtttgcaggcagcaggtaaagcactagtggagagggaagttggatccacaggagagggaaaggaaaactgctggaggtaggaggggtaggcctggggtgagataaagggcctggaagagggaagcaaggatgggtgaggtgtagaatccttactcctgaagcccttcactgctgatacttctgctatccttggcatgtgacaattcctcaagctgaggtcaatgccactgtgtcaattgcatagcaattctctttcttggggattcctataaaaactccctcataacaattccccaagtctctagtcttaccttgacgcccctcagtcttacacaattccttgctattttgactagtttgaggttacccatcatgaactccttcgacatctctcctatcttgatttatatactcttcttggtctcattttttcctgcaatattaaaaattctactgatctttcaaggtccaactcaattgatatcccttatctatgtctcactttcatcttacatatacatttttaaattacttgatgtcttttatgttatcttataagctaatttaaatacttcttaaaacaaggaagggattcaatcaacctatcaatcgtcatgataccctttcctatctcatcttcttttcatcttcttcaactttttgactcatttttatatcattcctctatgaaactattaaaccccttaagggcaagtaaatgttttttgcacctgctctagtatgacaatacattatacataatacctacctactacaattaataaattgtaagctcctggaggacaagaatttaggagttagctagctagatagagatgaatacacatgcagagatatatttacattctctcaagtataccaatttaatctaatacttactatatacttgctagcaattagagatatataaagataaataaaacaaaacacagtctctgtcttccaagggtgccaatccagtgtggcaatcagagaatgagagggcttgaatgacatgctgataaaattggactgtattctgctaggtttcttgcagaacttagggcagaggatattaatagatatgtgttttgaaaagataatgctcagagaaggatgaaggatgaatttgaaaagaatgagattgagggtaggcagatctatgagggggcttttgcaatagtgtagatgacagataataaagatcaagtgagggcaagttggttacagatgagatattgagtgtatatgcgtgtatgtgtatgttgggggagtgaggttgtggtgcacaagaataagtgtccagaagttatttgctaatcttactttttaaaagacattaaatggtaaatagtagtaataactatagcttattacatatcgtgtaacacattcctctagactggccttaggcaatattgagatctgttccatttcaccacttaggatcctctaggcccgattttggcactttattctatatgatcggctatttgttcttctcttattacttcaggtctcaagttttgatcatcctatgagcccatatatccttcagagcaagacaatgtgaataggcatcgttgcacttggtagagggttaggcaaatagtggatgccaaataaatccttgtggaattgaatggtattacctggagttccctgaaggttgtacatcctcttactccttggcctttggaacgtccttctctatacctggaattcttcctctctctctttacctcctctgactactgtctctttacctcactttgaccttcctagttctgtttatcacttcctctaagagttgttgcttgatgcccctgcactgggttagcagattttgctaagtggtccacagaatcacctacttatgtgtttctctgccagctctataaagacagaccagactaccttgcggtaatttgttcagtattttatccccaggttgagcacagcacctggcatacagtagacattcagtaaatatttgttaaatgaacatggttttgtggggttttatttgtaaatctgaacattttgaaatttgaatcttcaaatagctggacataaagtgctagatccatccagacgaaagaaataatgggagaccatctagaaaagtattttgttctttatgctattaaattcagtagaaattagttattatattttttgaggactgttatgcaattaacactctggacaacatgaagacagttcagatttcacctttctatcctgccccccaaggacatgcaaaatatctgcttgggtacccgttttttcatgtgtacacactagcatcttcagttgataagttcctgtggggcaggaacagtaaacttctcagaattagaaagcaaaagtgacagcaaaaacacgacaacatcagaaagccagattctatgtcagaaagtcttaggagttgtagctttagtgttctgcagacaacccaatgtcacaggaaatactaattcccttgctctggggcatttattaaaaacaaaattttttgggaggccgaggcgggcggatcacaaggtcaggagattgagaccatcctggctaatatggtgaaaccccatctctactaaaaaatacaaaaaattagccaggcgttgtggcgggtgcctgtagtcccagctactcggtaggctgaggcaggagaatagcgtgaactcgggaggcagggcttgcagtgagccgagatcatgccattgcactccagcctgggcaacaaagtgagactctgtctcaaaaaaaaaaaaaaaaaaaaactaaaactaaaacaaaattttacttcctactgcctggtaccatattatgcagtagagacagaggggttaaggaaatcaggcatagtccttgttctcatgtagtttgtagttaaggagtgagagaactggcagtgacctgattttgaagaggctgattcaggtcaagacccaattttgaagctggtctccaacaagaagagtggtttctaggaatatagctctgcacaagcaaatacatatcccttagacagtctgtgacatggagtgaaaaaccctccctgacagatcctttactagggatctctgcaagggctcagatctctacttcaatagaaatgctcattggtactatctgaggacgatttttccaagaggcacaaggagatcaattactactggcagcctaatttgcaagataaagaaatttcccattattctagtatcttcgcaaccacagtctacttcagcatcatcagccgacatcatggcatagtggaaaaaaatttggaatagctaaaaagtcacagattagaagttctcatagctgagatgctgctatgtgcttcttgttaaaatccagggttaggacaagggtcagaggattcttgtccttctacacttgagtggcctacagccatgtattcttctaaatcatgttttgaatttcgtcttgaaagataatgttttaagagtgctaagcttatatactcatacaacagaaataatatgtgtgataaagttgggcaagaagtgcttttaaagttgtcggtttctaaaggtgtctttttttaaatgggtacttaatagttatacctatttatgggatatatgtgatatcttgatacaagcatacaaagtgtaatgatcaaatcagtatccatcatctcaagcatttatcatttctttgtgtaaggaacactccaattctactcttttcatcattttggaatacacaagaaattgttaatcatagttgccttattgtgcttcaaaaaagttgtcttttaggttgtcttaaaatttggttacgaattgataacactagtcagaatcatgatttatattctgtagatcatttttttccatttagctttcagttataatacctcacagaataataaagcttgataggttaagtgtcttggtcctgactatcttgagaataatggttggagcaagaactatggtccagacgtctgctctagctgcaatgtttcccctccctactccattacaccacaatgatggatgaatgacggatgctgcagcagaagtaattacagtaaactcaagatataaaaacaattaatatagtgaaaatatataaattaataataaatataaaatacatgcatctttaatattaagatgtaatataatttataaattaatatagcaaatacagtaatatctaatggacagtgaccccatcaccccacttttacacgtgcctctaagagccatttcttatttttgaaggggagcagctacaccctcactctttgggttgcggtgccgtgtagaagtgatgagaatgggaaactgatacactcctgcacagagaagccaatctgaatgccagatgattaagtagaaacctccaccatgctgcctcagacttacaaatgaagtgcaaattaaaatgttagatagacatactcaacagcctgtaacatcacaaggactgtctttggggtatccatttctataaaaagaaaatctggcattcctttttggaacattaggccaaagtagaggataatgagaacagaaatgccttatgcagtcttaataatctttctactcagaggattcagtggaaactagtaactaaaaaagattagccttgcatcaagaccgagctatccagaaatcgcccggcctgggatgcagattcagtcacttaagtgagttgtaacacaggctcacttgtaggtttgccacaattttcttgcaattcagttccttcctctgtcaggctgcaataatgagatgaattcctgcaagaagtactcccagaaagacacagggaggtctgagtagataactaacacagatatctagagaacagaagtgctagacgaagagagaaataaacacacacaataattaaaacaaagatttttttaaaccatagcgacattacacttatctcaatctttaaaatccaggatatctatatctttgtgtatttctcactgaaactttccctgggcctcccaggaagaacataaagaataaagaataggttcattttcttacagattaagagatgtgaggctcaaatgaccttatcctggtaacatagctacattactgcaagagcagcatctttaatccctatgattcctactccagtcactctttaccagtgaaccatcaaagtaggtgatgatgctgaaagaggtacagaagattcagcttgtgaagataagccgaatgacagaaaatgcactttgtgcaaacctccatgcagtgatcacaatgcattttagccagtggttcagttctctctctgtccaactagactatgtaccttgaggatagaaaccatctgtccacctaatgtccccagtagtcagcacagtaactaacacatagtagtcaattaatatttgaagaacgtataaatgaatgaatgaaagcatgaatggatctggaaaagttgccatcaggaattggggccctgaagaaagaatggggttcataaataacattcagcaatcatagtcactgaattgggtactaatattagtgaaaataatagagacagtaaaaccaattataaatagataaagaaggtagtgcttgttctgttttgtttcataaaagattgacaattttatttatgaacacaggatttgagctaaaaagagaacagataagaaggtaggtgactaaagaaatggttgccgagaaaaagtatgaaacagagtttagaacagagaagaggatacagagataattgtaaaggtgtttgacagaaaaagggaaaaggagaaaagaaaaagctttcagtaggacactttatgggcataatagggttcttctttagggcatttcggaagttgagagagcaaagatgagaactcgagagacatggaatggacaaaagagaaagggaggtgagatacatggtactgatcactcacagggaatgaggaagggaagtaaatggcctcaaagaagtcatagctgtcatcgagcagcaaatgccttctgtcatgcaggtggaattaaagcttaaatgtgaactgatggtccatcttcagcttctttctcttctcgctctgatacctgccctcaaggttgctccctggctggtcagggaactcacactgagctgtagaatgttcccaggctctggacctttctgtactgttattcaaccatcagcacttgctagcttctgtcctattctctcaggatgcctgtttttattaaatgacaaaggaagttaattggttcatcaagtagagcaattcctattgtgggcttagctggctactagttaccttgcctattacatataacagcagtgaaataaacataaaggaatgaatgggtgggctttcattacgtgccaggccctgagctagatgcagcagagtatggcagaacaggacatgggctttggagacagacacacccaagacagaggtctggtccataatttcctagctataagcttgaggaagttatctcctagggttcttggattcttcatctgtaagatatgaagaataatttcttcaccctcaatttcctcctctatgaaatggagataatgttgcctacttcgcagggttcaaaatacatataagtgataataatgttatttactatttattcatttatccccactttaaaaaggaaaagctgaggcacagagaagtaaggtgtgactaaggtcacctagctgggaaattctagagctggcatttaaatctagcatttgtctttatgcacttacccaacatactatgtcatcttaaccaatacactaaagcatcattagatgtttccatctacagcctcttacagtggggaaacagtttgatattcaccaatctcatttaaccctcacagcacctctgtgcagtactaacatcttgctttaagatgaggaaaggaaagctcagagaaggtaaccgtggccaaaactcaacataggcccagagaagggaacaccagccaaaactcaaagagctaattagtgacagaacttgaaattagatgtagggtttatgaccacaaatataaatataagaaagagagccaactctgggcccagagtagatgcccacatctttactagttatctaggtggtatttctacattgcttttaaagttctctgatagcaaagctgaaacctggctaggtgttgtaagatagatgagaaactgcaagtcaaggtgtgagttcaatgagtggattttaactcctaacttcaggagtactggtcaattatcctttactgagtggtgctatcagcccacggtaaaataaattagatttttaagaaggtgcagaattgccactataaaatcagataagcctactgcagttgggaataaattctatcatagaaatacatcttgcctgatatcaaaggaagccaagaaaccatgccaagagttggatgaaaactgacattttctgctgtggagacagaagtggtagcactgattggagaattatattttgaagagttctaaaatatttatcatcattctaggtcatttattcatttacccttttaatgctcatttcttttgtgccactaggtcgagcttaaaagcaaagaatgaaaattcactgtgtttttatatattaatatgaagcaggaagtttctctattgcttggtttgaaaaataaaagcgtttctgagaaatattagaacactaaatgttctttcagaaacatggcttttgtcattaataaggatgctgggtgtatctaagcgtgttatgaatttgtacttttttttgtttgataacttcctgtaacttgaagtatttcaagaagggaaaaagctgataaaaactactaaaattgccattgcttcactgtattgattgccccattatgtttctttctagacttgactcaggcatctccttctccaggatgccttttctgctctccattctaattaagatggccttcctctgtgctccaggagcatttacacaaaccactatccatcactgcccttatcacactgcatcgaagctatctgcccgcacatctgtgccccctggaaggcaatcaggacaataaccatggcttatattccacctggtgtcctcagcacctggcatggagccagaactcagcaaatttttaccaaagaacaatgaattttaaaacctgactatagaatggcagaatgctccttctgcctccacgaaatttactttcaagttgaacaattttattaaaaattccattttctaatggtatcagagacctgcaaagctaaagaaaaagcaagtcttatttccaggtcagaacttatttcccaggtcctcactatttggcttatataatattaaaaggtatttttaagagtataatttctatttctcaggcttgaaggatacttttgttagtgtcctcatagctttctattttggctttgcatccagagaaatgaaagaggcttgactcagctgccgcttaatactgcacaagcctgagagagaagactattatataagctaatgtgtattttaaggtgtttttttttttcatagccaatacctaaatgccaccttccaacctcatgaaagtgctgaaccccagtgtgtgggaaagcgaggtcccctacacggctctgtattccttataagtataaaaaataaaagcagttgattaagggttagcaattttcttttctttctttacacgtacttgtaattcatttaatgcaggaagtgggctgagttttcttgttctttccaattcaactctcagggagctttcttgccagcctgctatggttaccatggcaacaaggcgatggtggcagtaatatgatctcatatgccttgtgtcaatagcatcagatcatcacgcttgaggataattttgacaataagcttcagatatagattcaggatatattaccatttgattgatttaccagaaatactgagcaattacagccttaaacttctaataaaagcatgttcacaaaggttagcgtttttccctagatgacatattatatggcattctgaaatttgtaaattgctttcatatatctgcttcaattctcattaggcaggacagatataatcatccccattttatagaagaggaagtaaaggcccgtgcaatgtgctgtgtaaggtggcaaaagcaactccacagtgaagctgaaacttcaacttgaggcttctggcatcagaatcacactttcctcatgcctgtgttaagaattcatgggtattatcaaaatgttcttagatgcataggttagaccctggaatgtctgaattaaaataatgtaaatgtatctgtgataaataactactagtttgagaatattagtattttatatttgggtgatgcttcatacattttatatctcccattacaccttcctttcctaaggcttttctgatactagatgcacaaatagatgcttatctctttctcccactgatcaacatcttgtcttttttgttgttgttgttattagtgacatttatttttccattgtgagttccttgaaagtagggatcatgttattcattcttggaaggtccctgatcctggcacagtatgtatggatctgttatgtatcaggtactgtacataatatgtaccaggtacataacagatacaccataaatgcttgttgcttgttaaactgaactcatctgacacccacaaaccccatgaggtaagtacagctggcattatgatccactattttaataaagtggaaatagaggtcatggatatatcatgggcaatttaattctttccactcccagccatgtgctctttccatgtcgtcctgtttgctttattctttcattgtttctctttcattcattaattcatcaaacatttattagttgctctttctatatcaagcattgctacagataatgggttacaaagataaataagacacaatcctcagcaccaaagggctcacagataatgcagataattttctgcctaggcaagtagtaaaataaaaccttatatggaacttcgagtatgcattatattatttcccaactttattggctctttaaaatgtatcttgagaatatgtttcaagtccctctttaatgcagtgttttagaactggataagccttgagccattgccaatatagggtgatactaattctgcatcttcgttttttttcttgggcataaaatcagcatttccaacatcccacagaatccctaaacttaacgtgtcctcaatgaaactcagtatctgacctgaacgaatgggaagtggcagaaagaggcagatggtcagggtgagatgccagactctgccgtttgatatgacttagggtcagttacaccatctaggggtttcttcattagtatctggcacgaaacacagtgttcaaaatacttcttaaatgtattaattaatgaatgagttgtcaaagaggatgaaaaatgatgacataaaatagggatacctgaagcagtgttagcattagcaggtactcaataaacatcttttaaagagtggactaaatatatacgattcaattccccttcctgaaacatattaaattgccaagacaaaacttctaagttatctttatgtctctttccacatcatagagtcaggtttatttcacctctgcaatgtcttggacttgtgcctttctcttcatccaatagcatgatttgatccaacccccaccctttcactagtagactctcagagaaggcccttgactgaacttcctctctttccagggtctcccattccaccttactggtgaaactcttatttttaaaggataactaggagtgtataactcttctggccagagattttgtattgatttgtatattctaattaagaaactttttagaatggtaatcaagatcctctaaaaggtgatctttagttatacctatagtcattcctttccatatactctaggttttagcttcccctacacacacttttggacttttaagctttcttcctgtattcctagttagtggagtaataacagctttgtaatacttttgcacaacactttgcaatttgtaaggaactcatatatgtttataatgaaactttgtgataacctcagagtaggtggatatgatcattttcatttcaccaattaggaaattgaaaatcagagagttaaatcatacagattctcataacctttatgagaattctattggaaaatatttgtgtctatgatgattgtttaaccatggaatacttgaatcaaactctttaaattaacaactgtgacttcaaaatgctaacgattgacatttgttcagctcgttagcccagaggctaatcatgatgcttttcttctgcatagcaaaagaaactatcaacagagtaaatagacaactacagaatggaagaaaatatttgcaaactatgcatctgacagaagtctaatatacagcatctataaagaatttaaacagggtgggcatggtggctcatgcctgtaatctgagcactttgggaggcggaggctggtgcatcacttgaggtcagaagtttgagaccagcttggccaacatattgaagccccatctctactaaaaatacaaaaattagctgggcgtggtggcatgggcctgcaatcccagctactcaggaggctgaggcagaagaattgcttgaacctgggagatggaggttgcagtgagccgagaccgtaccactgtactccagccttggtgacagagcgagactctgtctcaaaaaaaaaaagaacttaaattcacaagaaataaacaaataactccattaaaaagtggcaaaggatataaaccgatacttttctaaagaagacatacatggagccaagaatcatatgaaaaaaagctcattatcactgatcattagagaaaatgcaaatcaaaaccacaataagataccatctcacaccaatcaaaatggctattattaaaaagtaaaaaaataacagacgctggtgaggttgcagagaaaaggcagcacttacacacgatgggatcataaatttgttcaaccattgtggaaagcagtacggtaattccttaaagagctaaaagcagaactaccatttgactcagcaatcctgttactgggtatatacccagaggaatataaatcatcctcccataaagacacatgcatgcgatgtttactgcagcagtattcacaatagcaaaaacagaatcaacttaaatgcccatcaatgacagatggaatgaagaaaatgtggtaaatttacaccatggaataccatgcagccacaaaaaagaacaagatcatgtcttttgtgggaacatgatggagctggaggccattatccttagcaaactaatgcaggaacagaaaaccaaataccacatgttctcatttgtaagtgggagctaaattatgagaactcatgaacacaaagaagagaataacagatacttgggcctccttgagggtgatggttgggagaagggagaagagcagaaaaaataactattgggtactaggcttagtacctgggtgacaaaataatctgtacaacaaaccctcgtgacactagtttacctatgtaacaaacctgcatatgtaccccacaacctaaaataaaagttaaaaaaaaaatgatgttcttggctgggtgcagtggctcacacctgtaatcccagcactttgggaggctgaggtgggtggatcacttgaggtgaggagtttgagaccagcctgactaacatggtgaaactctgtctctacttaaaaaatacaaaattagccagctgtggtggcgcatgcctgtaatcccagctacttgggaggctgaggcaggagaatcacttgaacccaggaggcagaggttgcagtgagccgagattgcaccattgcactccagcctaggcaacaagagcgagactccgtctcaaaaaaaaaaaaaaaaaaaaaagatgctcttaagctggattgcctgtgtggaatcctggctctactatttcctagctgtgtggtcttggatagattacttaatctctctgtccttcaatttcctcatcattaaactggggataccaatagtttctattgtgtaggattgctgcaaggattagtgaattttatgtgcgtaaagtgctaggataatatctgacacatagcaagcactcctaaatgttgctacccttaaagacacaacctaagaacttctttggctagtccctggtctgagaaggaaaatcaattccttcctcattggtgctaccttgtttgggtcttctatactggggacactatagctgcctcagggtgttggctcaggatagattcagaatatctgaatctacttattgggagcagtcactgagtttctctaagcctcattcaccatctgaaaacacctggataataacagcattttacatcataggattgtggtgatcattttattaactagtacatataaggcatctagtgcttggcatggagtaactaatcagtaaaatttagtgactattactgttacataaatgttttgcccatgatattttgaccttcttgggttaggacctgtctttttcgttatctttatgcctatctttgttgcttcttcacagtagatttaaaaaaaataaacatttaaataaaaaagattttgcttatgagtgtcttggctatatgggctcttttttttgttccatatgaaatttaaagtagtttttttctaattctgtgaagaaagtcaatagtagcttaatggggatagcattgaatccataaattactttgagccatatagtcattttcactatattgattcttcctctccatgaacatggaatgcttttccatttgtttgtgtcctctctgatttccttgagcagtggtttgtagttctccttgaagaggtccttcacatcccttgtaacttatattcctagatattttattctgtttgtagcaattgtgaatgggagttcactcatgatttggctctctgtttgtctattattggtgtataggaatgcttgtgatatttgcacattgattttgtatcctgagactttgctgaagttgcttatcagtgtaaagagattttgggctgagatgatggggttttctaaatatataatcatgtcatctgcaaacagacagtttgacttcctctcttcctatctgaatacgctttatttctttgtcttgcctgattgccctggccagaacttccaacactatgttgaataggagtggtgagagagggcatccttgtcttgtgcccattttctaagggaatgcttccagtttttgcccattcagtatgatatgggctgtgggtttgtcataaatagctcttattattttgagataagttccatcaatacctagcttattgagtttttagcatgaagggctgttgaattttgttgaaggccttttctgtacctactgagataatcatatggtttttgtcattggttctgtttatgtgatggattatgtttattgatttgtgtatgttgaaccaaccttgcatcctagggaggaagctgatttgattgtggtggataagctttttgatgtgctgctggattcagtttgcctgtattttattgaggattttagcctcgatattcatcaggaatattggcctgaaattttattttcttgttgggtctctgccagattttggtatcaggatgaggctggcctcataaaatgagttagggaggagtccctctttttctattgtttgaaatagtttcagaaggaatggtaccagcttctctttgcacatctggtagaattcggctgtgaatctgtctggtcctgggcttgtgttggttgctaggctattaattactgcctcaatttcagaaattgttattggtctattcagggattcaacttcttcctggtttagtcttgggagggtttatgtgtccagggatttatccatttcttctagattttctagtttatatgcatagaggtatttatagcattttctgatggtagcttgtatttctgtgggatcagtggtgatatcccctttatcatttatttaaatacaaaagatttttcaataaaaatgattaaagtagcaggatagaacaatctttgcagagaaaatcccaaactctaagtggatggatgctgagactgtatgcaaaaacgctaaattctagaaagagttaaatttgaaaatatctattcttattacaaaatattgatctagtggttgttgggaaaatataaatgtaccatataataaattgggtttggattattaaaattctattaccttgtccacaatggaagcaagaatataaatgactttataaaactaaaaagttttaaattttcttctgtacattggcatatctcacaaaggaatggaattggttacactgcatatgagaacattttgatgcagtataatcttttattgtgcagctttatatagcaccctttcctgaaagagtgactgtacagcgcctggtgttctaaatccagtcgctaactcaaaccttttcactttcataaagaggttttgggaatgaagttaatattccatttaccaaactaaaatataatattatgtgctgcaatgctgtgagcccacccacccaccagactgcagataatcttctattcatatgctcaaatcaagtactatgcatatttctagctcactatcaaaagtaactgcacatatacacaaagaaaggatagaagaaaatgaatgagcagtcaaaaatgactgcaggcgactttaacaatacaagatcagccatttttgacaaatatttgatttgaaattcactgatcttctattaggactcaagggctggcaggagtaacgaatttcctgagcttctcttatgtatgttcagaagtattggatcagtttttggtctcggggtaacaacaatagcagcaaaacagtaacagcaaccaacatgcactgagtttacttcacaccagcactcaggcagaacttctgcttcagcagggtgaataagagcccccaaaggtatcagatcctaatccctggaacctgtaaattatgccttattaggagacaggaacttgcagttgtgattaacttaaggatcctgagatggggagattaccatggattatctggatgggccctaaatacaaacacatgtatcttataaaatagatggaaagggagctttgacagacaaaagaggaggaggcattgtgaccacagaggcagaaattggagtgatgtgggcacaaatcagggtatgctgacagccgccagatgctagaagaggtaaggaacatattaccctctagagcttctggagggaatgagcccctgctgacaccttgattttgcccaagtgatacttattttgaattcctgttctccaaaacttggagagaagataaatgttttttttagccagcaagttcatggtaatttgttacagcagccatgggaaactaaattaagcatccaaccattgaactaatatactaatatattgctgaactttggttcattccttcataagcctcccaaattcttgatttctttgttctgtgggggctgctgctggtaagagtagagctattaaagcatccttccatgtgaagcatcacctgctgacatttttgcagaatcccttccattgtcagccctacctacttacaagttgaaattgacacacaggtgcagtgagtcaaggtctgacttgaatgctttgcttttctctcagtagattttcttaaattcagcaagtcctcacttaatgtcatggataagatcttggagattgcaactgtaattgaaactatgtataaagaaaccaatttgaccacagtcaaatcaatataaacaagagttcagttcctatggtatatttctggtcaaagaaagtaatcaccaaacttctaaataaagaagcaaatacttctaatattaaacatcaaaataaatgggagctatacatacatttaagaaatattaatgaaaaggaagatgatgatttacccaattattccagttcaaggtcgcctgtcccggcaactcagggcaccaggtgggaacgcaccctggacgggacaccctcccatcgcagggcatactcacacccacattcgcactcactcagactgggaccatgtagacttgccaattcacctagcattaagcacatccttgggccgtggaaggaaaccggagtgcctggagaaaacccatgcagtcatggggagaacaagcaaactccacgcagacagtgacccgggctgggagtcaattttttttcttatcaacatcataaggaaacagcattacaggaaatggtgtaacttgaggacttgctctatagaactacacatgccattatttcagtatgtttcttttcttgtttgatctcattcatttgcacacttgaatccaccaataattaaaaacatctgtgaatataatcaatacataagtaatgaatttattgtttctttgggccagaaaactgttaagaacttgttatatgcaaggcattggtttagaaaccagatattcaatgataaattcttgacctcacttaaattcttattgagatgaaaagaaatattatcaagtcacaaacagtacaaagctgggtgtgaaaatgccataaggagaagatggagacaacgctgacattcagatttctggcttaaatgactgaaaaaatagtgatgccatttactgacatgggaactgcaggagaagcagcagatttgggaagagcagtggatttgaggtccctggggggcatccacgtggaaaaacaggcctgatgttaaggagagagaacttagaggttttgaaattatctgggcattggtgataattaaaatcctaggaatggaactcattgctcctggacattgcataatgggagaagaaaagagaggcttagaaaaagtacagggctagtaaagcgtatcgcatattaagagaatgatgactaacctaatttgagatttaaagggatctgataggagataaattaaaaatcagttgggtctatccaaagaggataaccctatatgccagcctccaaaatttagactttttttttttttggtcatatgtattgagtcatagttagaggttttaatttggggactagtaggattatagctatgcttataaggtaaatccagggtagtgtgtaggatggacattagagagaaaagacagaggctgaagagttgagttggaatgttaatgtgatgatctagaattagaggtaatgaaggcctgaagaactgttttaacagtgtgtgtatgtaggtatgtgtgtgtgtgtgtgtgtgtgtgtgtgtgtgtgtgtattttccccccaaatatactaaataaaattggtatcaacatttcttatcaacactatagggaaacagcattaaaggaaattatgttacttaaggtacttgaggtttgatgttcactcaaacacttttgagtatttatttctgcattaaaggtcttgcatttcatacatacaggtgaaaaaagaggaaggcaagatgtcaagagaaaaaaatgtggcatatggcctgacccagtttatttgttgagaactttgtggaagcaggatcagtaggatgcgctgcgatgtatcctggcagtggagaggaaagttaataataaccatagccacgggatgaacagtggctgctcactgagtgttgctaagggccatcaagaggtgaatgaaaagaattatccttttgttcccttcatggagatgctggcaaatgaactgaatttaactcaatgaaccacaaagcctaagggtaactgttttcctttgtggtttgcttattgaaagtcactgctgagctgatacgggtgttggggacaatgtctttgaccttggagttcttaaaaccatcctcagactcaatgaacagttggtaaggttttaggaatgtcctagcaaaagcactctggattctgcaggcaagtgggataattcctgaagtattattttaaaaattgtgtgaaacagtggaaatacactatttggagtcagatagatgagggtttgagtgccatttctatcacttggtgatcctgagaaaatcagtctccttaagccttaggcaaaatggggataatgatcgattttgtgaaaatgttaataaaataatatatggaaaaataatatatttgaatttatagatgagacttaatagataaatgtgactgccctcccatacttaaggtcactaaaaatattaattaagagtatgttgaatagaagaatttggaaaagaaaatcaagctagagagaatgggagaaatttccttaagaaacaaaacataaaattttattaggactatttgatttgcttaactgaaactctatcaaaagccattttctggtttttacatgaatcttcaaatatttctaatcagcagtttttctcttaactgccactcagcttttggttggatgatgcagagatgtaggtgtttcgagtaactaatacaattcccttctagggtatgttgcagggtgccttaacttactgtgtatgcaaggtaaataactcctaatatgagacaacaaacaaaatacatgtctaatcaattcagaaaaatgtttaggaagctccataaacatgttttcataaacgcttgctggcagccaacttgcctggctttcagagttgctataacaaccagcagtcctctcagcagccttggcactctgcattcttacatcttttaataagaaatatcattatcttgtctgggctcattagctcaattatttaaagcatggtactagtaaagccaaggtagagggttcaaaagtatgcattagcaagaaaattctatccatgtgtcctttgccaaggcgacttgttcattcattcattcatttaaaaatatttattgaatgtctgccatgtgccaggttctgttctaggagctagaaataaatcagtaaaattaaaaaaaaaatatatatatatatataaacatgtatataaaccaacaaaacaacaacaacaaaaaaccaacaaaaaaaccccaaaaaaacaaaaataattaagatgccagttttagtgatgtctatagtctggtttgaggggcaagaagggagacagatgctgactaagcaacaaattaatatacatgtagaaatacatgtagagtgagaacaatgaagacaaagcagggaaaggagacaggtgctgtgttagggtgaggagaaagtgcctcttgatatggtgacattagagcagagatttcgatgaattgaataagaaaagctgtagctaagtcatggaagaacgttttaaacagaaggttagcagggcacaagctctgaggtgagagtgtgcttggccggatcaggaccagccaggagacctgtatgactggggtattagtcagggttctctaaagggacagaactaagtggatagatgaatatatgaaggggagtttattaaggagtattgactcacaagatcataaggtgaagtcccacaataggccacctgcaagctgaggagccaggaaaccagtccaagtccccaaacctcaaaagtaggaaggtagatagtgcagctttcagtctgtggcctaaggcccgagagcccctggcaaatcactggtataagtgcaagagtccaaaagccgacgaatctggagtctgatgtatgagggcaggaagcatagtacaggagaaagatggaggccagaagactcagccagtctagtcctttcacgttcccctgcctgcttttatcccagccacactggaagttgattagatggtgcccacccagattgagggtgggtctgcctctcccaacccactgactttggcaacaccctcacaaacacacccaggaacaatacattgcatccttcaacccaatgaagttgacactcaattgtaaccatcacaattggagtggagtgctcaagggaagaacagaaggtgatgaaatcagacaggaagagatgatctgtccatgcagggtcttggaaaccactgtaagggattttagattttattctgagtgagacaggaaacgaatgcagagttctgagtaaaggggtaatataatctgacatctactttaggaaaaattgctttggatccagagactctacgtaggggctcaagaaggaaaggggatctgttaggaggttattgcaattaaacagaggagaggtgatgacagcttagagcaggtgccaaggatttaagaaataatcagactctggatgtttttagaggtagtgccagtgggatttgctgatgaaataaatgtgaagtttttctcttgagcactagaaaaatgaagacagcatttccgccctggggaagactgaaaaataaaagcatgcacaaacttatttgtgtgcatgtgtgtgtgtgtgtgtatgtgtgtaaggcagaatggagttgtggatgccttaatgttgagatttctgtgagacatctaagtggatactttcatctaggcaactaaatgtaaataataaaatctctttatagatttcagagttcaggagagatgtctgggctaaagatacaactgtaagagtcatcagtttatagatgtaatgtaagccacgggtctgaataaggacacctaggaagtaaaaatgatagagaatagaacacaaagaactgagcctttgggtaatacaatgttagacttgggaaagataggggaggggcatccaaaaggagagaatgagaaggaatggcctgcaagatggaaaaaccaagagataatgggggtattggaagaaaattaattcaatatgaaggaatttatcagttaagtcaaatgctgatgataggtcatataaaatgagggctgagaattgacaaattcggcaatgggaaagtcactgatgactgtagttagatcacttttagtagggtggaaaagagaaaaatttcctgttaaagagagaatagaggtgaagatggtgattacaagatcttttgggaggttttgctataaagtgagctgaaaaattggacagtaactgggggtaatgtagggtaaacagaattttaaaaattcaaatgaggacttattgtgacatgtttgcatgctgatgaggataatcgacagagaggggaaaattgatgatgtgcgtgagagcaggggtagtgaagcctttgagtagacaagaggggccacatagtttaaatgtgggaaatttcattcattcattccaaaaagttaagcaaacatctaccatgtgccaaatacacagctaagtactaggaacacagaaatgaataaaacatggttcccattatcaaagaagtcatttctttgggagggagaataagcattttctctaattaataattcacgttcaatgcagtgatggtaatgtcagagaaatgtacccagggctcttttctgggatcttttcattacagcatgctgaatcttgggctgccatgtcattagaagcctagattcaagaccttcatttccatcatgcattgacatgttctgggctgtactactgatgagactgatttaggcaagagttctgggcatgaattggtgctgtggctgcacagataaagtcgaggtgatagatttgagaactgtgtgctaggtaaatcagcaatcctggtgattggttgacttgaagtaaggtaaagaagagggaggctcaaggataactcctaggtttcccatatttagttttatcctggaagcgaggatgctgataaacagattcctaacaggtagcgtgggtggataagaagaagaatctgggcccttttcttaaaaaaaattaaggtctgataaatacctgatactttcaaaaatatttgaaagcagccagatatttctgtctataaaaagaaaaaaaaaatagacctgatctctataggatgtcacaaacgctcaaaaaataaaagataggaaagactaataatacaatgctagaacactttttgatactacctaagagacttaagaaaaaaaacaccaaacccccaaaacacagagttcttggtatgatgtatttgtttttccatagaatggtttgagaaattcagtgaaaattaattggaacatgtggttgtcattcacatggttccagactttatgggcttaataaaaacattatgaatagtttttggagttttgggagaagcgaacatggctggtctaggtatctgcttttaggttaatccctctacgcaggaagtttcacagtgtcatacagtgcttttcaatttttcccactcaaatgctcccactatcagagggatgagaatgagcttccctggatggcagaggaagaaagggggtagggtagtctgagggtgtaacttgaagtttcaagttgcaaacataaagtttcctttaagtctagtatttcaatttaacagtttagcaaattttctgtgcaattccgtaaaatattcatttctttcatatagaaataatagagtctccccctccccccaccttaccctgctctgaatcactgagtaaaacctatgcatggcgaagatatgtcatgttttatctcatgactttgattgcatccttgtatcctgtcacaaagcaggggaaggggaaagacacagaaccaagtttcaggaggcctggactcttctacgccagttcgacatttattttttaattttctttgcactctacttatttccaagaggagttttggagttgctgtaagacttttagaaaatataaatgatctgtgccttgatttccttatttctaaaaacaaagaagttactctacatgatctctatattcccttcttatcgattaagagtctacccacttttggtccaagcaaaatgttaacagggctagtggatggtggtaccaaatgtatactggtaaccgatcaattaacattttggaaaaaatggaatattcagctaagatttgagtcatgatggaaaccttgaatttaaaaaaaactaaccttgggagattattagaacttagaatccacatatttgacatgtgctgtaaaaagaggttatttcttgagaagtagaattgcaactttctgctgaaaaaatatcaatcctccaaggcatcctcagtaagcccacaggcaaactcccacctcagcagactgaataatttgcctataaaatatcacgttgaatttgggaggctgaatatggtgggaaaagtttcatgtaggagaggacctgccctggagatgctcgctgaggtggcaaaggcaactggactctcaaagtagtcctccgtttaacaacatccctttctcaggtacttctctcatctgcccgattacttttttttttaaagcctgacaggaatgatgcttccagattctgagatggtaacaatgatctaaatagactgtcatcatttatcagcattcacaaagagaaaacagctatgaatttccagtgggaaaaaaaactttagaatcaaaaaagcaaaaggtacataatgctgtatccagtgaaaacttataaaagtgtaatgttcgctttaaacacaatacaccaccctgagagggttgccttcagtaaggaattgttttcctctgggaaggaaatcactggcaataccaaatctataaggagtgccttagaaacttggctgcaccaagggccgtgtagttttgggaaaactcagcctgttttctttgtctctagacattttttagacttgataatccctcacatgggtgttggggtgtcttcaaggtctccaactctgtgctgtacttcgatcagcaaatgcttggggagaatttctgttttgattgcatctgccatttgcctccacaaattagacttttttaaataaaatgtaatccttttttgctgagacaaggatgaacacaatttattttgaaaagatacataaaatgtattataaaagacacaatgtgcaaaccagaaattgaaaactaaaaacgaacatcacctacacagaaaattctaagttcttaaaccagttggttgaacgaccttgggcaagttgtttaacttctttgaatcaatttcttctttatctgtaaaataaatacttataatcgtttcaagaaagtttattgactagaatccctggagccattcaaacagattcatattagccctcagcgtggctaatggcttcatctcaattctaagtgcggcacatactttcttgaaagtattgttaagtatttattttatagatgaaaactggttaaaaactacacagtagctgcatactgtaatggattctgaaaaggcctagttcaaactctgaccttctataaataacattgtggcctgccatatgaaaagacagtattgctagtgtcctgttgctgcatgggtgatgaaattaggacacggaccatgaatgagttgcctgattctgaatcagactatcaggcagtacagaaggatgccttcctctaagagttcattatttcctattagaatgctgtgtgtgctgcacatagaattgaggtggagcccttagccacactgatggctaatttgaacctgtttgaatggctccagggattccagccaataaacagaaacttgtctgttcatctgtacattcctctcaaattggttgaaataaatcctcaacacttgatgtttctgacctggttcacagatactcaggagcagcctgtggtatagcattatgagaaattttccagtctgttgagtagaagtaatccaatcctgtcactgtttgtggtagaaaggagagagaatatagagatgagatccaagaaaacaagaaaagttctgaggcctagaagaagtggaattctgtggcaaaaagtctggagaaactgaatttgagtttatggaaaaagccaaaagacagaacatcctggagaatagagccactctttgactggaagcttggaggatgattgtgagtagaatggcctatgtctaattctacatgcaggaggatggagcaggtggggccgtttcagggccaggaaagggtctcccttctactggactgggatgaaacaagagccaaggaacaaattgagttgcagtagcagatagaggaggtccagtctgagggtaaagcatggtgtccaagtagcattcagcaatggcagagcataaagtagatagttccaactggtagcccaagataaagaagcattcaaatgtatgcctgtggatggtgttcccttcccacaaggcacagaggattctgggtcaggcatcactcagagttccagagggaagggtatacatctgtcaatgcatagcaggtctcagttattcagcccaaagcaaaccattggctaaaacctttgataaaaagaaatgtgacatgtagcatggagggtggggcaagactgaggctcaggaatgggacagggcctgtcagaattaccagaagtgaggcagcaccacaagactagatcagcagcaagagttatttgaggtgcagtcacaaaaggtgagttagaatttaaatacatgccactttgggtctgatttggtcttaagtgtgtaggccaaggctcagtcttgaggtagagcatgatctcatttgtggtaagttgagagtatgctgaaattcagcatgaaaatggagatcagagatcctccaccttgctgtcagtctagacagagactgaaaaactgggttaaaactttaaagtctttatatcttggatatggagataaacaaggtaatactgcctggataaataggggaagaagctatcaaaatggtattgatctttccatttaagactatctattaccattcatctcttcaacatttgaaaagatgttcagtataacattgggattttaagtgatgattgtatcaaaaaatgataagtttaaaacattttaaacttatcagtgcacaagaacgggatgaatgcttatccagtatttctttctgtatttattatttgagtaaatcatgagtaataggttggtcccttatttaaaattttagttatggtcaattttaagaggaacacaataatctttttttttgtcttctgtacagttatatcaattttagcagtttggtgtctagttttaccaatgctattttatgatctttgccatttgccatggtacaatgtgtttaaatggcacatcaaggtatactgatggttgccatttgcttaataacttaaaagtaatccagcaatttcttccacttttatttcttaacatatgattttgttttgtgaaacatgaaagatgagtcttatatttaggaaccatttggttgggaagctgggagagtaaaatttaattgattttttttcttctgcagctcttgaagaaatagcatgtgaatccagattaggtggcatcatgtatatttttgtaaaaggaatttttacttgcttaggctgaattcatccttataagcctccctcagccatccttaattcctccctttctctcactcctgaagtcaaggattactatgttttattcctttttctgctgcaatatcccggactcttctctgtccatcactatagccacatcagctaataagctcctcttcctgtgtccttcttccctctctactcatcctctatagtgccatcaaagtcagagtattaataaacaaatcctgacatgtcagtgtgcttactccccacattttgaacggattaagttcaaatgcctcacaggatggcatttgaggtgctgatcctaatttatctttctaaccttgtttcttgcctctttcttccattcctcacatgcaaacactgaactccagtaacaccactttgtcttctcaacatactctgcactattgtgtcttcatgccccttggtacatgctatttcctctgcccagatattcttcctgggcttctgtacctgttgaccccttcaactcatcctttaaggactggttcaaagaccacttctgtgacatcatccctgattcccacagagttaaacaagacttctatgacacgccacagcatctgaaatacatctgtgctggaaacttctactatattgccttgtaatgatttgttagtgaacctctctcttccacttggtctgtagctccagaaaaccagtggctgtttgttgcctactcgtctttgctttattcttccttctgcctgtccacctgctctcccaacatccaggggccaggacagtccctggcacacaatgaacacccaacaaacacttggtttaagcaatgaattattatcttgcacgagatttcatgagtctctttagttttgctttcttaacttacttaatgcttattaagatgacttttcactttcagttcttcctgtttgattccagttcttagtcatgtcttccccttggcacaaaactgattgagcaatatatgctgaagcctcactcttcaaatttcatgacaaagtctgagggtcccaggactttggccaagcacaaatagtaagtgtctgggaggcatcaactaaattatctgccagtgaaaatgctctgtcttctttgtctcagttgtttatgcagaacaaccaaccgttcctgtaaagttatttttcctaatttttagcctaaacttttcaatagatacaggccatttctccctgtctcctcctatctcctcatcttctgagactgtaaattatcctgtaacttcatttataatgggaacatatttattttctgtgatgatggctcccctgagcctttctttttcttagctacataaagttaacttcctctgtggcaaattaaggacagattacaagcagcctgggaaccgggctccgtcaccacagggggccgcctactcagcctccttctgttcagccatgggaaagatgcagctgctaagccagccgggtgctgggctgctctccccctgcctctcctgatccctcggagggagttgagaagtccctttctccatcagtctctggttggtgtctgatgctctgttttctagcctctcttcttctgctcctcccctcccccagctgcctaccaactccttcccacccccaggccagcagtgactgcctccaagactccccctccttccagcaccgcctcatggtttccatggcaacagaaaatgttggtgggaagcaaaaatgctgaactgcaactcgtgttggggctgggaggaggaggtgaaatgtgggcctctctggaggctgtagaaaggtggggagaaagaagccaggtgagaagccctgagaagaaaggaccacgaggctcgaaaggaaggtgcattggcaagcggggatcactttgatcagaaaaatcagctaggaggaagaaataggaaagagttataaaaagtaatagagaatcctgggccgggtgaagtggctcacacctgtaatcccagaactttgggaggctgagatgagaggactgcttgagcccaggagtttgagaccggcttagacaacatagcgagaccttgtccccgccttcaaaaaaaaaaaaaagtaatgaagaatcctatatatagtggttgattgagggattacgttaggtataaaactgggaataggtgactttatattgaaggtgagtagtgaaagtcaacaaacatagtggccaaaaaaaggggggcttgagagtttaacaataatatacatacatgaaaaacaaaagtaatattaacagatctgggcttgtaaattaactattgtccttacttatcagccaagtgttacttatcttctctgagccttagtcttctttttgcttgtctattaatatagtgttatcaatatccacctcaaaaagttgttgtgaggatcaagtttaaataaagcacataaagtggccactcatatagcaggtaaggtaggaatttttcttttaaccattgtatgaggttgaggaatggtacttcaaatgggtcttggagctggaaacttaaaattcattgaaaactgtgccttgtcatatatttgatttttgtatttatttcaattttccatatctcttaagtatatggcaacatggtttttttttttcttttttttctttttctttctttctttttttttttttgagacagagtattgctctgtcgcccaggctggagtacagtggtgcgatctcggctcactgcaacctctgcctcccaggttcaagcaattcttccgcctcagcctcccaagtagctgggattacaggaacatgccaccacgcccagctatttttttgtatttttagtagagacagggtttcaccatgttggtcaggctggtctcaaactcctgacctcaggtgatccacctgcctcggcctcccaaagtgctgggattacaggcgtgagccaccatgcccagccagcatcatgtgactacgtccctaagtacatagtaccatggcaatatttagtgttaaccccttcataaaaaataagaagaaccatcctttccttttaaataacctccctgtctgtgcttttcaagaagcctgtggtgttgactcattctctctcctttacagccacaatattgttggcatcataacttctcatttcttttctctctcttcagtgaaaggggttgctgcagaaattatgttctaaacccacaatcatgtttataatggtccacgaatattttttgactgaatgtctgtgtcatcacttccttcagaagtccaaggcaagaaaagctaagaagttgtggcccaactagagatgcccataagcctatttactccgggctgtctctttgcaatcttagaagatgtcaagttactgcagaggctctacttcatgcctccttttcctgaaattgggacaataatagcaacgatgataactagcgcctgaacttgttgttccaaagtgcctgacatgaatggaatcatataaacttcaactcaacccaatggaattagcatgttgttaccgtgacggtttccacatgtggaaactgaagcacagagacattaagtaattttcttaaggtaatatacctcgtaagtttcagggctggaatttgaatctaggcagaatctacctccttaatcatctccactgtgctaccctctagggaagaaatatctggaactgtggcttgatgatattactactgctttttatagacaacgatttttttcctcacttggtatcatctaatgaataaagaaggaacgtgttactgtacttctatttcaagatgtgtactgagcccattggtttatcttttttctcctcttagatcccagtaaaaaaagctaaaaaaagaattcatgatctaacaataatgaggataattggagaaaagctatatggatctgggagatttcaataaatttccagaagtcagaaagagcgtggaaagatgatgcagtggggcagaggtagctttgggctagtgtgtttgcagagggtcctgaatcaaaaaaagagcccaagttgcccatcagaacctcggaagtttcagtctgagagaatggagatgggatggaggaggagatagagaagtgagtagaaaatgaggatgaatttaaaggtctgtgtattgaacagctgcccacctgcctgtaacacacatatccccaccccaatctctctttctctctctgtttctctctgtctctatccctttctgtctctctctctctctctcacacacacacacacacacacacacacacacacacacacacacacacacacacaccaggcatttaccctccattctcaggtcaaaaaggaagtaaggctaactctctaaagacattttaaaaagcctttctggggagagctggagcaactagtacagtggtgtttgggacaccctgatcattatagggacattctgctcaccacaacacaaaacctggaaattaaaaaaaaatgcacacagaatttccagtttgcttttccattgcctcttcctgaaatatgaacagaaaatcacaaactacagtcattagaggatagcttttagcacgagcgacaaagatcaaatgggaaataatgcacagcagaaaaactaactcaaaagacaattccaataatctcaatataaaaataactaacctctaactggtgtttctaacaggttcaaaacaatacatcagaggaaaaagaaaagggtgccaaaaaaggaatagagaaaaagagccttgagaaattgaaaatattattgccaaaattttaaaaatctatttaaacattgaaagcaatctcctagagtgtaagatgaaaatacaaagagttggtaaatgtgagcacaaggataaaagacatggaggaatgatggaagaaatccaacacctgcctaggaagatttcacaaaaaaggcaattgaaacgaagagatagatagaaatgatcaaagaaataatagaagggaatttcccaaaatgtacctttatatttaaagtgcctaccaagtgtggaacaggatgaaaaagacacccactcagtcacatcttagtgacacatcaggacactgaggataaagagaagatcctgaaacttccagagagggagaaaggtcaccgataaaagaaacaacgtcagactcctcatcaaacacatcaaacactgtaagacaagagagcattgtcttccatactcagaaaaattacatccggccttgaatgacatactaagccacgctattaatcaaccacaggggcagaatatgggcatttttagattcacaaagggttagaaattaatctttcatgtatttctcagctgtttcttttataaacagttatttgaatgtgtgctctggcaatatgaaaaatgacacagggaggaaagcatccaagaaacagtggattcaatggaggactgcaatgaagagagtcccaaaatgatgaatgtgtggcagtctcagagaacaggtccagcttcggacaggaagactaaggattaatgtgtggcagtctcagagaacagcccagcttcggacaggaagactaaggagatgggtcccaggaaaaatgtagatcagaaaaacagatagtatgatggagactatgaaaatcttaaggataaagtaaagataggaaatgcaagatgaaggaaaagtaatcagagatgacaggaaagattaaacagggttaaagattaaacaagattaaaaaaggtaagttctaggataactctaatgttcccagtaactgtgcaaatgggtgtaaccatcattatcatgggtgccctgcctctcaggacccaggtatggggttttcattcttgatacggcttcccacaccccacgagttggcatagaagcagagaaatactttcaggtcccaatgcaagcttggatgctgaggacttcagcagggaccaccatacagtacagatttccctgtgtgcctggcagcactaaggtctctagtattatggggtgacaacaggagaagccaatccagatggcaatggaatttcatgctggctttgccatggagtaaaaactaagttgacttgaaacacacacacaaaaaaattatattttgtcgcacttgaatttgtgggctaagattcagtttgcaactgtagtgtgggtagaggaattaggagagagaagagatgatagtattgacaatgtaaatcctcatctctcacatcagaatgtcagtaaataatatctaaagttgataaagccaaaattaagggcatttgcatgttatatggagataaccaccagaaggactaagcacagaaatattgaaagtatttgcttttggagagtggggctgggaacagggagaagaatgcaggaaatggtttgtattaaagttttatttgtatatttgtttgaatgcttgaaaattatatatgtattatttcattttttttaaagtgtgctcctttctgtcaattttactctccttgctacagtgtagttaagttgtccttggcatcattgttcctgtgtctatgtagaccacctgttttggaagaaggtgaggttatcaatcaaacggctaaccagtcacaggcatctactcattcacttgctaagctccttcctcattctcgtttccaagagtgctttcaaggacacaagagaagaccctatttagtgctgtcattgtcttggttgtgcggtaacaggaagcagagaagccttaatttttagcatctagacttcagctccaaatactgccattgaaatgggaagctctgattacagcttctaaagtgcactgttttctctgtgctacagaactgtcttctgaattagtatcaataaaacgctttctaacaggatctttgacaccagaagtcaccactgatgccaatgtaattaccatccctggacgctaggccttgtcaggcagcacagataatcacctacaaccaggggccaacgattacccagtcagtcaacgacattgactgctcactgggaggttctgcacgagtaagagagaggagaactgcaatgtcctttcctcaaagtacttcaaactaaacagggctgagggtgtggaggggaaggaaagcagagattcacacacatcaaaagacagaaataaacaaacctatccattctcagttacacagagagggctgtggagatctgagttggcgcagaataaaaatggacttttgcatcgcctggcccctgtttggtaaaaacctccttggttttatgtatttcctcttttcattttttttaaatggtgttatgtatttcctcttttcatttcttcccctgcccactaactgggctcaactactgaataacccctgtgtgccatgctttttctgtgcttccatactaattatatgctgttccgcttgcctgaaagctgttcctatcactcagccctttcagcttgcaaatttttctaatctatcaagaggtaaacctgacctcttctgtggagccttgcctgattcactccattttaattccaatcagttacagtgctgtgagctttgtgagaggagggacagagtatattatcatttgaaaataattaaaattgttaatagatgtaaaacacttagaatagtggtgcctgaaatgtaagcaaatgtgtttattattattattattagcatcattactatgatcaatgtttgtatttagaagccctagcataacatctggcatatgaaagtggaaactaagcaaatgtttctttgtttgaattcttggaacatttcagacaaactgagttttattgatgagaaggttgatgggttttcttggcagtggtcattattccaaggtgaaagtgaggattattgctttagctattgcaactgagaacacagaatatcttttaagaagcagaagctctaataggtgaataaatcattttggaggataggaggatattccagatgatatgaaactattgaaaacagatttgctgttggttttcagaaaatgtactagccctcaggaagatgggcttgtttggagagatacctaatgtaacacaaataacttcattttcttcagcattatctggaatagatggttaattagtctcagacagctgtttccatactcacccgcctttgctgtctgtgtgatgtgcacgtgtgtgctgtcatctgggtgagcctatctgggcacagtgacgggtcattaagctgtcttctcatatggtgcatgtatagtgtctgaagcacagtttcaggagacaggtaacacttccactcagagaggcattacatgacccctagggttgtcaatagatccgtagctcttttgctcttcaaacactacatgcattttgacatctcaccatctttgttcattgttccattcactgttatgtccttcaccccgttctttactgcttacataaatacactcaagcccacttcctccagagatttcaccatcactccagctcatagatatctcttccatctccatcatattcagcttgctttcttctttctttgtctctccctttctccctttctctctttctttttctttctctctcttttttctttttctctctgtctccctccctccctccctcaacctctctctctctatttttctgaaacagagtttcactcagtttcccaggctagaatgcagtggtgtgctcagagttcactgaagccttgaactcttgagcttaagcaatccttgcgcctcagcctctcaagctgctgggactataggccaccatgcccagctaatcaatctttctttctttctttctttttctctttgtttttctttccttccttccttctctttctttccttccttccttctctctttctttcttcttcctctctttcctttcctttcttccttctttcttctctttctctctctctccttctccccttctctcctttctctctttccctaccttccctccctccctccctccctccctccctccctccctcctttctttctttctttctttctttctttctttctttctttctttctttctttctttctttttctttctttctttctttcaagataggagtctcactgtgttgctcagactggtcttcaactcctggtctcaggcaatgctcctgattcagccttccaaactggctgggattacaggtgcaagccactgtgcgcagccagtcatagatttctaacactaatttctccaatagttacattttatattgtgaaaacacttacattgttggcttttattaacatttgaatgtgatttgctatttgctgttaagtatgctagtcttagctccctgagtagactgttggatctttaagcagatgctgtactatggctctttgtagtttctaccacatttagcacagttagatgagtatataggtacttaataggtgttcccttaggaatgaatggataaccctcctgggatccattcaaaaggattctcctgagaactccttaacaaaggcttatctactttctagtttagactgtcaacacatgctaaaggataaaagatgcagatttgaaacacatagatttacattttaaaatgctgtggcatatttgttaatatacttcacagtctgaatgcaagtttaggttagttacccttgaggacaaagctactagactctcgaggattcaaatagtctcataaaaatcatcacaatgttatcattggtagttaagggaacattttataataagtgggtgtctttgagcatgtttcctagggaaagtgctaagtgcaatctagtccatggaagtcccacagtactctgcgaacaacctgcactacttcatggccacttcacctgaatggctcagttctttgagtgtccatgtagtcaactaatcagtctgtggtgagtaagagtaaattaaggtgactaactttccaaagtcctttaaagttatttgatttaaggtcgctgagctaggtggtttatggatatttcagtattcctggaataattcatgtaagctttttccttgtatccaatatattatgagggtaagagcaatgaagccctgtgccaatttctccatttcactggctaatcagtaattctaacattgtttgccagctaaatggaacaggcactcttgtcaccatcatgattcattgcctactgaaagcacagagctggccttaatctaattcttaataaaaccttgcgaactaggtatactgtctcaatttgcacacggaaaacagatgttcacgaaggttgagggactggcccacgatctcacaccaagtaggtaaagaaccatggaagcaattctgtgccttaaagtgcaattgtctttctaattcctgtggagcatgattgtcttttccatgctgaatctaatgattacaaatatcaaatgagccctaagcatggccctgtaatcctactccattctcctagtaaactctccttcccactctctgaaacaactttttaatatcttctctatccttatatcttctacatccttacagcattattcactagaaaacagaaaccatcagaagaaacatatttccatattctcaatgcctcatataccagtcatgatggtacccactctctctgtcttccctcctgttatcacaggaatgtccccattagcaaccaactctccacttggctctggatcccaacctctctcatctttattctttccatccttctttcttttccaatatcaatacctctttttctacctaatcattcctttcagtagccaaacatgactccagtctctcctgttttaaaaaattcttccctttgccccacaagtcaccctttagctattagtgtatttccgtactcccattatcagaaaaacttcttttgacagttgtctactacttcttctatccaatgcaacatggcttccgtggctctcatttcacagaatgtgctcttgttaagttctccaggagcctctgtgttgccaaattcagtggctacttctctagtctcatttctttttttttttttcaccttcaacttttattttaagttcctagggtatatgtataggatgtgcaggtttgttacataggtaaatgtatgtcttggtggtttgctgcacagatcaaccaatcacccaggtattaagcccagcataccttaactattcttcctgatgctctccctcccccaacccccacccctgataggccccagtgtgtgttgttccccaccatgtgtccatgtgttctcatcattcagctcccatttataaatgagaacgggcagtgtttggttttctgttcctgtgttagtttgctgaggataatggcttccagctcaatccacatccctgcggagaacatgttatcataccttttcatggctgcatagtattctatggagtatatgtactacattttctttttccagtctatcattgataggcatttcggttgattctcatttgatctctcatcagcattctacctaactgataactttcccatggagcaagtttttcccatggagcaagctttcccatggagcaagcttttggtagcattctacctgataactttcccatggagcaagctttctaaacactttgagtttgaggggtcagtagaatatataggaggtagaaaactttgcttctgttgagtatcggtgaagtaacctaaggtgaaagtgcagagtgagaagagaagagactcaagggctaagcctgagggtacaggcggaagcagggagggctacaaggaagactgagaaggtaggaggagataacagagacaaggttagaagtcaaggacaaaaagagttgtcataaaaaaaaaaaagtggtcagaatcaaaggccagagaaagatcgggtaaacagggactagtaaaagtatattgtctttggcaattgagagtttattggttgccatttataaataatttcaggatgatgacagaggctgatggtattaaggcctgattgtatttttctgaagagcaaaccagcaagtgtaggcattattttgggaggcttggttatgaagggaagaagagtaagtggatagtgtctagagcagaataagaattgaggaaggttttgaaaaaaaatcaggttatatctgagtttgctcagagagggtagagaagaaggcttccctaatatcacagcattatgcaagaactaaaaatagaatctatttcttctgcctccaagataattgagataatacatgtgtaagagtttaaaaaactataaagtacaataagaatttgatatagtgttcttctttccactatattacaattaattaccaggaagtcaatggattgcatttttaactatataacacaccctttaccccactccctgcaacaagaacctcactgctatttattcagcagttcttaaatgattgatttgttgtggatgatcttttgcttgcttccttttgaaacagtgagggatttctggatgtttgccagcctgaatattcctgtttacttgtcttaggctaacagataactggatgggccatattgttatacaggcctgatgaatgccaaatgttcagctctatctctacaggattacacctttctgaaaaaagaatgtataatataacttctgtcaaataaacttgagatacatttgtttctagtcctcagatttcaagatctcccttaagactttggaaggacaagcctaattctctttgccaggcatgaaaccagacattagcttataaactcaagatgttccataattctttcaatatgaattctaattatctttgctccttctaagagaaggtaaaagtataacaatgtgaaatctaattctatggactcaaggggcagaaatcagtgacctgatattcagaggcctatattaattatccattttatttttctcacctctgtaatttgtaagtagagttgcaagggctcttgttcttcagttactattttagatcatacactctcaaatgaatggatagttctcaatgcctgcgatgcgcttgattcacacagactagcctaggttgtctgaaatgaagtcagggagacgcatgcaatgacctgtaaggtgttgtttctgtgtctttgtagcctgagttttcttgtggataaaaatctatagccttttattatgacagctcattacaccacagaaaaaactaaactgaaagatagatcatgtcttccatgatcactgctactgtttgatgtggtgtctcctgcatgaatgaaatgactgccactcagaaggtctcatggtctgagaacaaacttgacctggaaattcatctgtatttttacaaccctgtgtatggtgagaaagtttccttagtctagactgcttaatatctgtataaggccatttttttcttctctctcacctctcttgttgatactcctctgaatcatcatccacccaagatcaaggaatgctcacgctacttttgtttgtccagggctcagatctttctcagctcactcagatatgttgccccagtatctcttattgaaaacttttccctatggactcagattgacctcagtttaaatcttcagtgctttggaccatatatttagtctttctataactaagttttgcccttgtaaaactggaataatactacatactgtgtaacatttgtgagggggtaaagataatgtatgtgataatcatataacaagttcttgataaacaatagttatattattaaattggctatattttttttctttctataaaacattacttgcctaatcatcaatttccttggagtgcttctatcaggtagttatcaagtgtaaggatggaacccaaataaatatttcttgtaagtgtgatttatttaggtactggaagaggctgcaaaataaaatggaaagagtgtagggctagaaaggtgacaagttcctggttctggtgttgccagttctcatattaaatagcagtgttatctgtatatgattacccatctatgaaaaactctaagttattagaaagattgaattcatcattgatgaaagagatccttcaggcatctggaatcttatgtaaacctcacgtagactgagtttaattcaattaaataactatttattgaatgatcattatggactgtgcttggcaatgtgggggataataaacaaaggctacacatatacacacatttattgagaactgttatgagttgaattgtgtcaccccaaatttatatgttggagttctaacccctagtagatatgtggatatagatacacatcctagtagatatagtaggatgtggccttatttggagatagggtctttacagacataatcaagttaaaatgaggtcattagggtgggccctaatcaaatatgactggtgcatattcgacatgcacagaggaagagatttgaaacacaaggagaaggtgaccaaggagataggtccagaatggctccttcccttatagccctcagaggaaccaaccctgctggcactttggtctcagacttctggcctccagaactgtgagacaataaatttctcttgtttcagccacctagtttgtggttctttgttgtggcagccatagcaaactgatatgaagacctactatgtgctagtaactgggaaactaacactgaacagggcactgttatttgtttcaggggaagaagtttggaaaagaagcagatacttcagtcccatgtaataaacctgctccaagagaagtatgtacaaggtgtcatgggaggacagtgaaggacagttgagtattaccaaaggcttgtttaaggctcctcagcagggacttctaagccaggcctttgaagtaagagtgcaagaatgagtgcaagaagcaagagttctgggcagaaaacagtgtttatatgaggcagtgtatgcaaaggcacagatatctgagcaggtgtggcactgttgtagaactgtaagtaatccaacatggccagagcttaagagcagtgaaagataaggctggagaggtgagcaagttccaggtcagtagcggaaggctccctggagcaaggggagcacctagaaccttgaggtaggtcttccttgattagcaatcgcgaggacataggctatgttaggtaggagggaaactgtaaacaaaagtgaatgcgtatatttatttggcagtgagcattctggtctggttaaagcagacatcctcttgacaagcagagcaagcaagtgagaagctaagaggtaagataaagtctctcaaaggaccagaagtatgacaaacggagtgctttgagggcagggctagtatcttgtttagtgcttgcagtatagcagtggctcaagaaacaatcactgaataagtgaagggagaagtggtgaaattctgtccttttactgaattaagcagggacttttaggttacagaggtttggttttgaaatctaggctctgctggcaatttttttaaccttgttgagtttcatcctctttatttctaattgtgagtatactaatattgaccgtattggtgagaattatatgggataatttatatggaactatatagaattatgggtatactaatacttagcatgggataatttatatggaattttatagaatatatggaactatatagaattatatgaaactatatagaattatgggtatactaatgcttacagtatatggtgagaattatatgggataatttacatggaaatatatagaacttaaaaattccatttgatcaatatttattaagaagctactatatgccaagccctgtggtaggctttaggactagaaagatgaacaagacccaatctctgcctctaaggaatttactttctgttagggggatggggaagcagacatctgaatagataaaagaactgtgatgcaatagaataaggactagcttagggctaagaacagagcaccgtgggtgcacagaggagggacagttacgccagccagacggcaggatagtgttggggaatacttcctgggggaagtgatgcttaagctgattcatgaacaatgatacgcaattaggtgaagaaggaagaaaaaggaattccaaacagagggaacaacaggcttcctttgcagctgtgtttttctagttcctgtgcctgtgcaattccttgctgaaaatatactctagtcggcttggttaaagcaaaaacaccctctctagctctcgtcagactcctgaaggttggatcgtgctctgaacagcctcagctattggctggcttctctttaaactaaacaggccttcagaaacccttcatgtagccacctgcctgatctcctcactccctttctcctgctttctttcttttcttcctgtccttcctcggtatctgctttcttcctcctctcattaaacatttcctatgtctacatgtgtaaactatgggctgtgcctggagatacaggggataaaagcatacatctaactcatgaggagctcgaaactgaaagtagggtcagcgagctatggcccattgaccagatccgcctgtttttgtaaataaagttttattggaacatgcccacgcccatttatctatgtactggctatggctgctttcatgctacaatagctgtgttgtgtagttgcaatagagaccatgtggcttgcaaagcctaaaatatttaccatctggccctttacagaaaaagtttgctggcccctgttctagtgtttatatatggcagaagtggtggggatagatggacaagtaaagaggtaatgtacccctgtaagataagtttttcaaaagggtactatagaaggagagttcctaacccatacttggagattgagaaaagaactgagagctaaaaaaagtgacaagtacgcttagagctaaaggataaaaaggagttaagagggaaaggaagatcattcttggcagagacagtagcatgtgcaaagccaggcaatgaaagaaaaacatgcagttctctattgcaaaaagaggaagcggtgaaagataaggcaggaaaatcagtttgggccaggtcattaaggatcctaaatatgaaaaccatattaaggattttagaaatgccctataatctctcccataggtaactgagaacctttgaaggattttaagcagagtagtgctaaagcaaatgtgtgctctagaaagatcactctggctgtaggatagttaacatttactgggcatttattctatgccaggtctgtgctaaacgctctttgcatttggaaatatctattgagtagctggacagcactgggaaccaggtagaaagaggtgaaacatggagaacagatatggatctatgagaaccagggatctccctaagggatgaaaaggtgtagagcaccacccttatttggaggcatgaggagaagtagaagaacaggggtgattgcaaaggggagtatactgtcatggaacacaaacggggagtaaataacaaggaggagtggatagtgaaaatcagatattgtaaagagagctaagagaagaaaagtggaagaacaagcagggggcagggaactggtaagaagcagatcagagctgacttaaaagagagcaatttcagcagaaaagttgagaaacaagctggattatagggttaaggaagtggttggaagtgagaaaatggaggtcactgccactgaacacttgtttgagagatttgtctttttaaagaagagtagaaatatgactgtggctggatttcttaaaattaggctgtaattcagcagctttggtaacttttctgattcatgaggtaaatttctcatctcaaatatctggtcatttgaagtaatactggagatcaaattacgcaaatatgctgcatgactaaattaaaggcctattcatgtgagcattagttagtaatgggagttgtattatatactgcattattagaaaatggggcagcatattttaatgcttaaaaatttaatcagagcaacttccagaaggaggaaaaggctcctttttaacacaagatttgaatcatggcaatttttttttttttctgaaagccattcttctaagatggtcatccctgcacatgccctcatttctgactttctgctgcacaagcaatcagtattcgtgcaaggctaatgggatatacaagaacaattagtagctctgccagcgccaatattgtacttgcctctttaaagagctcaaaatattaaataacaattggaaagaacatttcttctagactactcattagattgattttacagatgagtaaactgaatcatagagaaacaagatagtggaaatgagaagtcttactttggttctatctcacaccactgtaaggctgtgcctattatatctgtaattaagctgttgtccagataaacaataattcctgcttggctttgacttttagataccaacagatatttaaatgccggcagttgaaaaggttatttttttttctttcaaaagtgggtttgtaactattggcttaaattattttagaaaactatagctgtactttcaacataaggccacccactcaactctgagcctagactgtttgagaaataagaaggtataggaaatttggcaggtatttttctcttgtatctttaaatctcagtaagttcacaaaattttcctaaccaatattggaacaagaaattatcacggggggaggggggtgactaatctcaccttttaaggacaattaatttttctacttcacaagtttaacttcttatttggatcacaatatgctactaagatacttaaaaggtcattttttcaggccaactgcaaatgatgttttcattatagaaaagttatgtaaaagtggaaaagagatgtaagtccattaacgtgtaaaatgcaccatagcaatgggaaaaaagttttaatgaaatacgtatgagctctatcatgcgcaaatgttttgttgaaatggatgactccaagagctctgtggttccacttcagtgtctaataggcactactcactttaaccttcagcaagccctttatgaatgctatccacccaagtgtatgaaaatgccaattcatgtagggctatcagtattattgttatttcttattctgtaaaggctgcattttgaacattttaataagggtcaaagcattccaagtcaatctagatggcaattgttagaaatgcaggaggtgctttaaaaaatgagttggtaataatttcattcttctcccattttgattagtttataaatataactgtcagctagttatcatggtgaggttattggtcagtcctcctccaagtaatataaactccttaatacagtcttcagactatgaatctaccataacattgccagtgttttgatatcatcagtatcttcatcttcctttatttcaagctatgatagattttacctcttctattatctactgtaatttgctgctgacacaccaattgctagtaaatacatatgttgagcgatggtgattatgtgaagaatgaggggcaagatccctgtggtgtagtgtgtgtgcacccatgtgtgcatgaagaaacgtgtgtatgtgtgatgtgcatgcaaataatataggtctgagggaaatactgtactccccttgaaggtaagggtcatgtcttattcactgttacatccctagtacttaacactgtctctggcacagaaatgatatctaaggagtgcttgctgcatgaatgagtgaagggtactaatggtccatgttcccattggcaaaataaggcttccagtttaaaaatgagactggaggtccacctacaacaatctgttgtgctttcagtttttacaggctgatttctacgcacacagcattatgctgggacttgtgaggaaagcaaggaaactgaatacacagaacttggacttgagaagctttcagtctaattggggagacaagatacatacaagtgaaaacttaactcctaattctagagagagaatcatggcatgccaaatgtatttttttcatgtcaaatgtaaccactgcgtgagttcaggagaaaagagcctgttctgtactgcagccattaaagaaagctacctaaactaggcaagaattgagttatacctttgaggataaaagacagcagggaaggaaaggaaatgtctgtccaggaggagcgggtagagaatacagatgagcaaagttattaagataagaatagattctttgggacttaaaatttaggaagcagtcattagactttgaaaaataaatatgatggtagagacaaatataacaaggaaataaataagcatgcacattttgtatagtaatcacttcatacctaaactccttggtgaaaaaaaatgtcgaaacttagacacattctctatgttgcaaactcaggggaagtgagtgaaatgtcagaaggcatggcagcattcccagaggttagtgagtatcaggtaggctttgccaagcaggagggaggtgatgatatttgacttctgaggggataaacaggtaaggtgggatctgggcagattttcagacaaaagattctgttgtgaaggggcttctggttttaacatagatgtgactctccttaagtcttaggtgacctgatgtacttctgaaactattcattgattgtacaaatttctatttattttacatttttaagggcacagaaggatctaaactatgtgcacaactattctacaaaccaaactgaaaatcaaaatgaaatacacaaaggaaaagttgtttgaaattttgtctttaagatacagggaaaaaatcacacatcagtaaaatcaaggataaatatcagcctgaaggaggagcaataattgacaaatatttaaaaacaattgggggccaggtgtggtggctcatgcctgtaatctcagcactttgggaggccaaggcaggcggatcatttaagatcaggagttctagaccagcctggtcgacatggtgaaaccctgtctctactaaaattacaaaaattagccgggtgtggtggtgcacacctgtaatcccagctacttgggaggctgaagcaggagaatcgcttgaactggaaagatggaggctgcagggggctgagatcacaccactgcattccagcctgggtaacaaagtgagactcccactcaaaaaaaaaaaaaaccaaaaacaaaaaacaactggggtctttcttttctaaccatatctagacattggtgaaaatagtccttattaaagataataatagctatggagataaatcatccaagtgttgcatttatgtgtgagagtatgtatgtagaacagatttagcaaataatttttaaagctttcaataaatactttaagtgacttatatggacactttaaatgcacattcattaatggattcttgattgaataaaaaattaactcctgaaaatatttcctaaataaagtacatctatgcatggatgcactatgatgtttcaaccaacattaattatacccttttgatttctactgtcttgttcaaaaacactaataagacatgcactacatcatagttaataggagtgtggtgcttgttgcttaggcaacaggaggaataaatgcaggtcagaatgtgcttcaagaaaaacaaaagctagaatatgatactgagtggagactaagcaagtctaacagatttttcaccacattaaagaaatatgtttcttagagcaagccaatcatattcatgtgtttaactaagtttgcaattacataaattagattatgtagatcaataaataatttttataaaggtagaaattaatcgcttatgatactagtagcaaataaatggtgtataacagcatgtaaagcactaattgattataccacttcatgatttgcttcattttcataattaattaactcctctaaatggcaattcaaagtttttttaaaagataattctgtctcatgaagaaagtatttgattggcccatctaagttaataatattttcttattttctagaaaattataccaaatactttgaattaaacaagtaaagaatataatctatgattagaccttggttacatcatgtatatccaggattttgccttccatataaattttgaagtgcttatacatgattcattcatgaataatttttacgatctctctttgaatgcttatttgaaacctgtttgattaacctttcagttcgaggctttcaaaaaggtattatatttgctcataagtgtttaacattcagaggaaaaataagctgaattaaagtctttcagcttggccaaatgatccaggaaatccaaagacctaacttctcatgggaccagaataaatttggacaagggtttcagggttgggaatgagaaacccttatttcaagtagacatagggagaaataattaagatattgaaatgtacagtaaacataaataataaaaaaagacttcaattctgtttgatagttcttctaattcttaatgccatctgtttagtgtcctaagtctgtcctaaatctgcccagtgttctaagactttcatagcaattgaagaactttcacttttttccatttcaatacccaaatatcttgtctatataaccagtgacagtacttgataaacacaagaaaaataacagtagctgcatatatcagtataaaaaaaccaacaaatcactcataaagcattctgtgcatgcaattacttagagctcatatatcttactatatttatgtcttttttatttttaaaaactcttgggcatacatacttttggagaaggagcagaagttgaataatgttaataatcttcaaatctataatattcaagtcaacctcagagaaaaataatctaagatagaaattaaaaaatctaatcagctgtcactattgtgttatcatttctggtactagtaagctgcaggtgtcagccctattactgtatttaggcagggctattacttatttccacaagtcatttgtgtgttacatgcctgtgttatgtaggtctctctaaacttagggatcagtgatatgtgtgatgggtacttaaaagcaaggaaaggtaatagagctgtgacgtagcttaacaaggggaactgatgagcactgggggaggtatgggaatgattagaaagctgaattgtcggtttgcacagttccccatcctccttcctcacctatatgcaaaacggtggaaagttagcacatgccaggtttagattgcatgtagaccagaattcagaagtacatgactatacttactccaccaacctttctttctaaatattgacagctaaatgaccaaagtgtttattttccacctaaagtaataaacaatacttcatcgctcttcaatcagcaagtggaagtaaacgctctccataattgaccatctgaagcagtttgctaatgaactgaaggttgtccacatgatttaaactgcttattgaacaattatcaggaaaagaaatgatcttcacaccataaacacaacaaattgtctcattaaccactaaatgctgatgctcaagtgaaataatataagaatcaagaattagctgaagagtgatataatccgagtattctaagattacaaatttatttaaaaaatcataccaagaatgacagggagaatatcaatattaatcttctttcactgcctataaatagcactctcaccagttcattcatataacacatatgtatatggatacatacagatctcattttttagcaagagtctatatgtacacagcaagttcagtcctaagggcatccaattttccaatgcagttacatatataaatctgaccagttttggtgcaaatcaggctgcctctgagccatgtaagacacataagaagcaaagacagacaaaaggcagctccgtggacacagagagcttcttaccataaactgcacattgtcaaatccattagccatcaggtggttctcgtactgaggtagcccaatgctttccaaccattgtcccactgtttggacagggcatctgggtcctgtaagaggatgaagagggaagcgtttaagcagggagtagccgtccacggggtaatagcggtagtcctgggctgagaggtggcattgccacatcatgcccctgggaaagttgctatcaaaggagcccgccagcttgacagattaatgttctcagcgagagagcaaagtcagaagtaaaacatagtttgccaggcaggctgtggagtatgacttgatcctagctccacatttcttacatattaatctttactaccgaccagtacgtcatacagcccccaaaaccaggcagcagaagaaggcatatcaagctgtcagcttgggctggtctgcgttctatgtgattgttggagtactccacaatgagcaatgcacggccggcagccagaattcttttttatcaagtactcctacactcatcagtatgcagctccatgctccttgctccccctcgctcgctccccttcattacccagcccaggctacacctcgcattttcaataatagccatcagataaggcagattttttttgtctgcaagctgtaagcctgctgctgctgcttcctcctacacacccatccaagcgtcaatcttgaatgatgagagcagtcaaaacaaatgcagaaaatagcaagattcaaaagcaaaccaaagtgcttaaatctgaattgaatcttcatactggttatacgttacagagctatttgttgtggaattttacgtttcaaaagacaccaggaaatgcgaagcttgaactatagcttataacagagctcacgacaggttccctttctccttttcctttctttcctgtcttttcttcttcctttttaaatggagcacagataaacgtttctgatctgaagctttgcagtgtttggagaataattattctgtttctttaccatgctatagcaaaataagcctctccgagatatatatttttttcttttttgaaatactgcaaaatacagaaactgcatcgcaatcttgaagtcaagataatttatttcttgtttgcatggtttcttccaaacaaaagtattattaggcacaagaaatcctttttcccctctgatatttataacccaatctaccagggttaccattctaaattagctataaaggtaacattaactggatagattttttttttaataaagaagatgagccctaacccaaaataattcaagaataacagatgtaaatgtgtgagttttactgaatggcagatagactgagtaatttatttaataattgggagaaaccagggattaagaatagaacccacaggactagatcatcagaagaaacagactcttaagattgggagagaacttgcagaaaggttagtctaaccttcttcctaacgtaggcatccctggctaaaatgttcctagaggaatatcttccaacttctacttgaatactgcctgtaacagagctcttactacttctcacgaagcctcaatttattagaaagatatttcacttcctaccttgcttctactcactgctccagctctgccttcggagaagcacagattgagaacagtgcctcttccacataaagagctttaaaatttaaagataactctctcatccccccagagcagccgcctggcacatagtaagtgcctaatacaaatttattgaataaatgaaacatcgcttttcttttttcctcaaacctcatctttctctgtttcctttctctttttaagggcattgtcaactttcctggcacacagacattaaacctcaaaacatcttctactcctctttcactactgaaatcagtccccaaattctatcatccctcttcccagtgtgatccattcccttgattctatttcctgttttaagtttacagaactgccacctacattgattttgttctcatagttcaggcccacctagcctagtgaaacaacgacttctatattgatctttctacctctaatatttaaaaaatcaattttatgcatggtgtcagaataatccctttaagacacagttttgattactactccctgtctcaaaacccttctgtggttttctgttgtcttcaaaatcaactcccaactcctctgatgacattttggggtcttcatgattgactgcagttcatctaactttatttccacttttccactgccccagacaggcaggattacttgctggtctctaaaggcagcccataatgggctttggttggttttattatgtccccacatttctgtccatttgttggctttgaatcagttgctatttccattatgaaacctcttctaatcttctctaccacgaataaatctctttcttctctgtcttaaatggcatttttagaccctctattgtaacagatattttctgccttcaattttagttgtttgtgtctgacttattttttgaaagcaggcaatatgctttgctaatatttcacatagtaaagattcagtacatacctgctaaacaaaataatgtaatttcatgatccaaagtacaaaaaattctattttcaaatttaaaaaaagttttaactctatcccaagtctctaaattatttatttaaaataagataacttgttttttaaacagattttttcatgtctgtcttttagctcatcatcctcatccactttttgaataagcagccctgggtggactgcatagtacttgattatattttgttgctgattggtcctggatcttttaataacatcaaagagtttgtagtagtttatgaatcaattttaatagattctagttgctcaacattacctataggagaagctaaaaacaagatactatttgtccctggccagctctaaagctgttacaaggtggaagaaaaggaaagtctcaattatagcttctcctaggatcacagccacagtgcttcacctggtcattttgaattataaatagttgaatatactacatggaaattgagcaaacacgacaatgacactttggcttggcaaggcacatgctgattggccagctcttcaaacctgtttcatctgttaaaatgcaaaccaggggccaagtacctggcagagcacgatacacatcctgcttattaaataaactttgttaaataaatgcctgagtaactaaatgaataaatgatattggaaatgcctttcttgagattctcatttcttagtacagagagagggaaagagggagagggaagaaaaaatgtgtgtgtgcacaaaacatagagagtggactaatagacactggagactcagaaagggggagggtgggagaagagtgagggatgggagattacataatgggtacagtgtacactatttgggtggtgggtacactaaaagcccagacctcaccactttggatatatccatgtaacaaatctgcacttgtacctcttagagcaataaaaataaataaaattatatattacaaaagacagtatatttgtggtggggattatttcaaggttcagactgctatataagaacacaactcagagaaaatactggttatgaactactttacaaaatttatatagactgcctgaattttattcttttaggtattcaatccttcaatttttattcaataatttttacatgttgacaaaatgttataatatatggaggaagtgagctgggagaggatggggtgaggaaggtataaaagagagggaagaaggaaaaaaaagaagaccctgagtcatgttgtttgtttgcggttttgttgaagtattttctcatgagtcaaatctctaaaagaatcttggttcaggtctgaagatcactctgtaacagtgcttaaatatattactctctttacctaaaatacttttatggagtcttaaaattcttaaagcataacaacacactaattaggcaggaacttttattcaactagaatgtctttaagttccaaaagtgagacaagaggagggaaagaagaaactgaccattattctgggctaccatgtcctaggcagtgtggtgtgaattattatcctgatttaccgtaaggaaactgaagctcagagtatgtggtgaaaacaggaattttctttgtcatagtcttttaaaaaataataattctaggggttttactcccataatggcagtgtgaggagctccacaggtccaagccccagtcaaaaaacttaacttgaaaattataaacaaacaatcaaaaaaccctacacaatcagaaaccaaaaacaatgccaacaaaaaccaaccatcaaagtctttgcaaagtgtcctaagagcatataatgtaaaaatgtttattccaaagacagacactaaaacttggtaaaaacagattctgagattctgtagcacttgagccatagctccctctggcccctccttccctgcaactcatctccatagatgctccactttggatggatgtgtccaagagaaagggctccccttctcctcaaatcccaaccaagcggcatgggatctcatcaaaaggagcaggccagcatttccaatttcctctaaatctaagctgtagaggttcaattcctggtgagtgtggctgagaggtcaggggctcctttcttccacccagaccccattcatagaatagaaagttcatcccagctgggtcaggccaaaaatactgggatcttcactgccctcgactgcttacatatagggtagaggttccatgcccagaaaggtaaactaggaagaccagaggctatcattcttgccccatgcctggaagagtggctcaacgattttgcttaaagggagagtcagtttataagaacaaaaagctctaaagctttcccccaagaggttgacttatttgtttgttttcaatttttgttttggatttagggagtatatgttcaggtttgccacgtgcgtatattgtgtgatgttaaggtttggggcatgaatgatcccgtcaccaggtactcagcacagtacccaatagttagtttttcatacattgtccccctccatccttccctactccagtagtccccactttctattgatgtcttcttcatgcccatgaatacccaatatttagctcccacttataagtgagaacatacagtacttggttttctgttcctgcattaatttccttagaataatggtctccagctgcatctatgttgctgcaaaggatataattttttttctttttttatggatgcatagtattcaatggtatatatgtaccatgttttctttacccaattcaccattgatgagtactcaggttgatgccgtgtctttgttattgtgaatagtgctgcgatgaacatatgagcacagatacctttttggtagaatgatttattttcttttggatatagacccagtaatgggactgctgggtcaaatggtagtttgttttaagttctttgagaaatctccaaactgctttccacagagtctgaactaagtgacattcccatcaacagtgtataagtgtccctttcttctgtagcctcaccagcagctattattatgcctcttagtaatagccattctgactggtgagaaatggtatctcattgtggttttgatttgcacttctccgatgatcagtgacgttaagcattgtttcgtatgtttgttggccacttgtatgtcttcttttgcgaagtgtctgttcatgtcttttgcccatttttaatgtggttatttatttttatttgttcaattgtttaagttccttatagattctggatattagatgtttgttggaagcatagtttgtaaatattttctcccattctgtaggttatctttttactctgttgataatttcttttgctgtgcagaagctctttaatttaattaggtcccacttatcaatttttgtttttgttgcaattgcttttgaggatttagtcataaattcttccctaaggctgatgtccagaatggtgttttctaggttttcttctaggattctttttttttttgagatggagtcttgctctgtcacccacgctggagtgcagtggtgctatctcagctcactgcaatctccgcctcctgggttcatgccattctcctacctcagcctcccgagtagctggaactacaggcacccaccaccacaccaggctatttttttttttttttttgtatttttagtagagatggggtttcaccatgttagccaggatggtctcgatctcctgacctcatgatctgcctgcctcggcctcccaaagtgctgggattacaggcatgagccaccacgcccagcctcttctaggattcttatagtttgaggtcttactttaaatcttgaatccatcttgaggtaagttttgtatatggtcaaaggtaggggtccagtttcattcttctgcatatcgcaagccagctatcccagcataatttgttgcatagggagtcctttcctcattgcttatttttgttgatttgtcaaatatcaggtggctgtaggtgtgcggctttatatctgggtcctctattctcttccataggtctatgcatctgtgtttgtaccagtaccatgctattttgtttattgtagccttatagcatagtttgaagtcagggaatgcgatgcctctggctttgttctttttgtttaggattgctttggctattcaggatctttttggttcaacatgaattttagaaaagttttttctagttctgtgaaaatggtagtttgataggaatagcactgaatctgtagattgctttgggaagtatggccattttaaccatattgattctttcaatccatgagcacagaatgtttttccatttttttgtgaaactgaggttatttgacacagagtgtgcggaagtttaagcctaaacgtgttatcaaaatcaatggaggttacacagtggctcattcctgtaatcccagcaatttgggaggctgaggtgagaggatcacttgagtttgagaccagcttgggcaacatagcaagccctctatctctacgaacaattaaaaagtagccagagatgatggcatgtgcctatcatcccagctactcgggaggctgagatgggaggaccccaaggctgcagtgagctatgattgcaccactgcactccatcctgggtaacagagcaagaccctgtctgtaaaaaaacaaaccaaaccaaaacaaaaaaatcccccccaaaacccagtggagatattctggtgacaaacaatcaaaaagtggctaatagctacagtagggaaataagctaaatggtaggttagctagttttaaagaaacagagaaagacagttatgaagagccctgttgaggtcaaaagaaacttcaaatactagcttcaaaaattcctccttctcaaatttaattggagcagactctggagcaatttatagctgacggattgtcaaaaacaatagagcaatcagcaggcaattactggagtctaatatctggatgtgatatcaaatgagatagacaacagaaagattaggaaaagagacaaagagagccctgctataaccactgccatcccaaaactgtgcagatggccaaggctacacccttgagaggataaatacaacgtgatgcatccatactattgactattacttgacaataaaaataaatgaagtgctgatatatgctgcaaattgcatgaaccttgaaaacatcatgccaagtgaaaaaaaaaagctagttataaaagaccatatattgtataattctgtttaaataaaaggtcaagaatagacaaatctatagagacagaatgtagattaggggtttcctagggctggagaagtgaactgtggaaagtgactattaatggatttagggtttctttttagagtgacgaaaatgttttaaaattgtgatgatggttgcacaactctgtgactacactaaaaacaactgaattgtaccttttaaatcagttacttaaattatatatatgtatttatatagtatatcagtagatttaaaattattgaatgatgatataaaataataaaaacaaatcttaaaatttctttaaatttacaagaacaaaatgcacatacataattgtatataaaacattggggttgtttaatatatattggtagttttagtgctctgggttttttttcttctttagttttcttggttaccccttcctccattcttgtcctgcaatctgcatcatccatcctccctgcaaggttattcatgttaataaactggtatgtatattcatatatatttacccattttcaaataacacacacacacacacaaaggcagatatgttcggatatatacgtatatgggagagtatttttggcatggtttcatcaaaatgaaattataccactcacttttctgaaccttagtttgctcatttaacatcttataaaaattctactggccgggcgtggtggctcacgcctaatctcagcactctgggaggccgaggcaggtggatcacaaggtcaggagtttgagaccagcctggccaatatggtaaaacctcgtctctactacaaatacaaaaattagccggacatggtggcaggcacctgtagtcccagctactctggaggctgagggagaagaatcacttgaacccaggaggtggaggttgcagtgagccaagattgtgccactgcactccagcctgggcgacagagcgagactctgtcaaaaaaaaaaaaaattctactaagtaaatgagttttaatttattatttgttggttatttgtaaaaagttaaaatagttatttttagttattttcaactttttaaaaataactacataatagttcataatgtggataaaccacagtttattcagttctttgcctgatatctctaggatatctttgcctgatatacatccttttattttctttttttaaagatttttattttgaaataattgtcaatttgcatgaaatgatagagagagtgattctggatagattttcttcagttttctccagttgtgacatcctgtatgactttagcacagtatcacaatatcacagccaggtcattggcactgaaaaaaatccactgaccctgtttatatgtcctgtgttttacatgcactctgtgtgtgtgtgtgtgtgtgtgtgtgtgtgtgtgtgtttagttctgtacaattttatcacacgtgcagaccacgtggccatcatcacagtcgagacaccgacagcaccatcataagaatccctcctggaacttttttttatggccatagccttcttcctccctttcccattttttgacccctggcaactactgatctgtgtccatctctatcattttatcatttcaagaatgttacatgaataaaatcatatattatgtaacattttggaattgggatttttcattcagcagaattcctctgaaatccatacaaattattcagtgtgtcagtagcttattttttcatttctgagtagtattccatgatatggatgtaccgcaccatttacccattctcttccagagtggctgtaccattttacattcccattaatagtatacaaatgatgcagtttctttgcatcttcactagcatttggtgttgtcaatttttttatgtagtcattctgataggtatgtactaatatttccttgcggttttaatttgtatttccctcatggcttactatgttgaacaaaatcttattgcctgtatctttttgttaaaacgtctgttcatgtcttttgctgttttcttcattggattgtttttctactgttgagttttgagaattctttacatagtctagatactaggaatttgttggactttttatcaatttttttatggatcatgtttttggtgtctatcccattatttttaactttaaaaaatgagcatttaaaaatgtgtctcataaatagcccagagctgtaatattttaatctgaagttttaaaatacaatctctaatggcttacattttaatgggcaaatacaatttggagtaatgacaatcatgcttgattttatccattccatcttatgttcttatttatttacattgttgtttcctcattttccttttcttcatttttggtactctggtaacattcttattcattctatttttctctttttaactttgtgactctgagatacttctctattcctttcaaggttactttatttttccctgctctaatgatcagatatatacttttctatgattatttgaaaataagttaccaattatttccctctcaaaaacgctctatatccttcatactccagtaaaattagaccctcagaatgttttcctttcttcgttctctttttcctacaaccacatgtgatctctggaatgcttttcctttacccatctgccttattcccaaccagttcctaggttttgctgataatcatttagtaaacattttcctagtcaattactagaatttcctcacagtatattcctcctatttaaagagtctttatttaatatttatgttgcacactcccagttggtttatacatttcagtttagatttaattattgtaaagattcattggtcaccactatttcatatccttataaccatcttaatcttgaggtttctgtttccatttgtttgtagtttagttagaatagtttctcatatattcagaaaatattttaaactgattaatcataaaagcagagtgaatcacaatttgtgagatgcaggtaaaatggtacttggagataaatgtatagcactaaatgcctatattagacaggcagaaatactcaccactatactagtaaggaacaatgtctaccttagaaatgacaagaatttcaaatcatttatctcagaattcactttaagaaatgaaagtaagaagaaagataactccaacaaaaataagcagaagtaaggaaataaagatcagaggggaaataaatgaaacaaaagatcaatagagaaaaatcaatgaaaccaaaagctgttttttgagatgattagtccaactggtaaatctctattcaggctgaccaggaagtaaaggagaataaagaagtaatcaataccgggaatgagagaagtgacagcaaaagagtttttatggatataaaaagaataaagaaatgttatgaataactgttagtatcagtaaattcagcaacttagatgaaatgacaaattcattaagagaagcaaggtaccaaacctcactcatgaagaaaagttcataactgactagctctctacctattgaagtaattgtatttgcagttaaaatctttatacaaaacaaaacaaaactccaggcctcaatggctctagtgttaaattctaccaaacatatagtgaaagaaataatagcaattctacacaaactcttccagaaagttgaggagagagaatacttgccaacttattctatgaagccagcattattttgataccaaaatcagatcaagacattatgagaaaagaaaactatatgtattagtgtctgtcataaacatagatgtaaaaattcttaacaaaattttggcaaatagtatccaacaatatatacaggatgatacaatatgactaagtgaagtttaccccaataatgcaaggtctcttaaacatgggagaatcaattaatgtgattcatcagattaactaataaagaaaaaccatataatcctctccgcagatgcaagaaatcatttgacaaaatccagcatctacttatgataaaaactctcagcaaaatagaaagaaatttcttaatcctgataaaaaggcatttatacacaacctacagttagtaccatactagattgtgaaagactgaatgcttttctgttaagtttagaaacaaagcaaggatgtccattctcaacacttctacccaacattgtactggaggttctagctggtgcagtaagttacaaaaaagaaataaaatgcattcatattggaaaggaagcagtagaactgcttcttgcttctattcccacatgacatgattttctatgtataaaatcctgtgagacctacataaaaactacaagaaataataagtgagtttagcagagttgcaggatataagatcaatatacaaacatcaattgtatttccctacactaacaataaacaattggaatttgaaataaaaaccaacataatttacaacagcaccaaaactatgaaattctaaggaataaaactgtcaaaagatgtgtcaagaccaattaaatattgctgggaaaaatcatacaggacctaaataaatggaaagatatactatgttaatgaattggcacagtcaacattgttaacatatctgttcttcccaaatatatctatacattcaatttaatcctaatcaaaatcccagcaggtgctttgtttggtagaaattgtcaagatttttctaaatttcatatgaagtgcaaatgacccagaataaccaaaacaacttcgaaaaaaagaacaaagttgacaaaggtatactacctgactttaacacttattataaagacatggttatccacatattaggatattggggtcaagatagacaaacagatcaatgaaacaaaatagtggtttcaggaatagtgtgacacacagagggtcaactgagttttgacaaaggtgaaaaatcagttctgtaaagaaaggagagacttttaatgaattattctgggaaaatagaatacctatatgccaaaaaaaatttaatccatatctttcatcatatataaaaattatctcaaactgtatcataggcctacccatacaatctaaaactacaaaatttctagaagaaaacttagaaaaaaacttagggaaagtcttaaccttacagtaggcaccagaagtacaattataaaagaaaaaaatgataaacaactaaaattttcagactcttccctttgaaagacaatattaagagaatgaaaaacaaaatgctgattagaagaaaacatttgtgaatcatgtgataacaaatgtatatccagaatatataaagaactctcaaaactcagtattaagaaaataaatcaatttttaaaaatgagcaaaagatttgaacagaatcagagaaggtatatggaagggaaacaagcatttgaaaagaggctcaacatcactagccattaggaaaatgcaaatgaaaatgacaattagataccacttgttagaatgtctaaaatcattgccaaatgatgcgaattaagagaaactctcattccctgctggtgagaatagaaaatgttacaaccactttggaaaagtttgatggtttcttaaaaagccaaatatacatccactagatgacccagccattttactgctgaatatttacccaaaagaaataaaaacatatgccatacagagacttgtataggcatgtttacagcagctttatttgtaatagccaacaactagaaacatcctaaaagtccatcaacagatgaatggataaacaaattgtggcatatctatacaactgaatattactcagcaataaaaaggaatggatagttcatacacacaagacatggatgcatgtcaaaatcattttgcacagtgaaagaaaccagaccaaaagaatacattctgtatgattccatttatataaagttctagagagtataaacttaaatatagtgacagaaaacagatcaatggctccttggggatatgacaagattggtaggattacaaaggggcaaaaggaaacttttggggctgatgaatatattccttttcttgattgtggtgatggtttcacaggtgtgtatacatttctcaagtatcaaaaagggtacactttaaatatatgccgtttgttgtaggttaatgatacctcaataagcctactttaaaaagttaagctgggtgcagtggctcacgcctataatcccagcactttgggaggctgaggcgggtggatcgcctgaggtcaagagtatgagatcagcctggccaacacagtgaaaccccgtctctattaaaaatacaaaaaaattagctgggtgtggtggcgggagcctataatcccagctactcaggaggttgaggcaggagaatcacttgaacctgggaggcagaggttgcagtgagccaagatagtgccattgcactccagcctgggcaacaagagcaaaactccatctcaaaaaaaaaaaaaaggaagttaaaaaaataaagtagaaaaagaaaatacagaatgatgaggagggaagcaacttattttagacagaataatcagagaatgactctctgaaaaggtaatatttaaacagagactcaaaggtattgagggaacaagccattccagcatctaggtaaaagctctaggcagcgggaacagtaaatttgaggaccaatgacctgctctatattgtaatgccatggtgatcctgagggggtgaaactcagtggtacctcaattttggcatgttcttaatatcagtcttcttgtgtattgcatagccattgaagtcctaggagattgagataaatgtgttatttcaggacactgtctgaaaactgtcataactgcattaaaataaacccataatattagtttaggtatctaaaattaatttattcttttaaaagtaaaaggcagctaatattctgattaatttcagacatctcttaattaggttcgagttcattagggggaaaatacttctttttatactttattcatttcttcagcattcactgatttcttcaataaatatttatgttctaagcattttgccaggcggtggggagatagctttgaatatccatgtacttgtggaatttatagccttgtggagaaaatgagtttatcatttagagaaatgtcctttgagatgagagaaattaaaacttagagacatgacttcctattgtgaccacatagagatgagaaatacattagcaaaaacactacctgatttaataggtgttacttggtaaaactctgatgaaacagttaaggtgagtaaaatgatttggcagaggcagcagttaattatgtttgctaagcaggaaaatgacatttggaaaggatgaaggaaaacttctgaacaagagttttaaaaaaaagatgaagaaactggctgaaccctccaaaatgtaataactatctgtttatgctagcatcaaggtgactgacataaggcacatacttttcaaagaatgtgagtctttctagtgatcaaagccatagaaaatagaaggtagctaatatttattgggcacctactatgggtctggccttttatatatgttatctcattatgtaaaacaacatcaaacacatattgagcatttatttactgggagtcagcttctattctaaacgttctacatgtattggctcactttattttacagtaaactagtagtactattgttatcatctccttttatagggaatgaaaataagatacagagaagttatgaattgtctaaagctgcccagttaaaacttgaaccctaagtagcctggctccagagcctaactaagctttcagccactactctatgccgcttctgtgttccaggtgcacaggatgggaaacttgtccttttgcaggagtgagaatgctcatccatacacgtgccagcaagtttgttttaaaagggcttcttggggttactttgttgttgtttattctccttccccccttcaccttacattcattattcttggcttctaatgtgaaaagccatgagaaaaggcaggaggaaataacaagaggtgggagaatagtaaagcccatcacctggatatttttatttcatgtcagcaaagggctctgctgtgattttgaaatattgcagcttcagtgctgtttccacatgggtgctcagctggtctgcaatgcatggatgcctgtgctatgtgtccagaagacagctgccttgatgagatgggggacagtgtggaggtcggtagcccagactctcgagccagactgcctgggtttgaatcctggctcttttccatgatttaaatatttgctgcttctatttttaatatacagcaatagacttgtttctgggggcttagttgttctttggaagagtgaggggggacacctcaccccatctatctcatggttttatttgaagctgaaatgaaatagcacgtgaaaaaagcactgtaacttagagctatctcaatcgtagggatatattgttatctttactgccagtaaaatatatacctgtgttgttcattcagtccctcgaccaagagactggtcctgcgccatcagtgcatttccttgcccagttctctttgtttccaacagacaaaaatgcatggggtgagcagtctggccaaataacaggaaagctaattgtaccgtgaagtgatcagaattcccacacccatgatgttgttgaaggctttgtcttatctaatatgcaccaatagccaggtcttcagcactaagcagcctggtctttgcaatttatctaaaagtaaaaagagaaaaagcaatgtggggccaagagtggcaaagacaggatgattcttatttctaccgtaattagcaaaagggacaattagttattttaacatattttaaataaaggttggttatttttgaaggtactggtttaaaaaaagcacataatttcttaagaaggctatgcccacattggggaaagaaactgtgtattccactaataactaaagtgctggtgtctatgtgagcctgcctttctgtcttttacatcttgtgatacaggtataggagctaggagtgaatagtattcatttctgtaggacagaataagaaagatctcgactaacaaatctatttttaactagtaagtagcagtatctcatttttccaatcctaggtgtcctctgatctgagaattataaactacatgtccttcttccttatggagaaaaactgacagtaagaattagcaggaaaagagacaacccataagaacaatgcttcctcctgataaaaggatagccattctgaaattcaaaaatagaaatgcaaagcagaggtagcagacaacagaaaaatgaaagggattgtcattccaagaattggggaatgctataggtcaacaaagttctggatcataacgccgagatttaaataggaaaatactccaagattatggtctgatgttaaaatgctaagggaagtcaggagcttggattcaattttccctaaggccttgcattttatttctaactaaaatttcatggagcacttaagaaataccagcctttacaaaacagatctgacaacttatgtgctggggtatggtctaaaataggaaatgaaatttaagcctaaaatgctaaaatcttttggcagacaacaaaattatatatataggccatacctgattggaaaaaaatagtaattccgttgattttgttcttgttttcccttcttttaaggttgctggcaagtgtttgaatccccattgagaagaaggtgatcagagaattaagtcattgagccagtctgtgtgacagcctttgtgttaggaccagggaggaaagggaacatgtcccagcctcaaagattttagagtttagtgaggaggaaattaccataaagaatgatcagtattatattaaagatgtgtgcaagatatataaaatgttgaaggaaggggaggatgcttaacttggcttggatagagagcttatagaggagaccatctaatctgtgccttgaagacgtagtaggaatttttgaggcaaaaagaaggaagatggtgttccaggcagagggaacagcatgtgcaaaggtatgtttgaggaactacaaatgattcattattgctgtacttcaaaggttatatgtgcatgtatgaggagggaaatctgcacagaaatggaggcaggataagtaggaaacagacaatcaagggacttgtgtgccatgaaaaagagaactcttttctttcctgagaacagagagatttgatcaaattgttgttgcacaaacatcccctggaggatgtgggagatagacgaatacaggaaagaaactggaagtggaaaggtatagaaaacctgcaaggctctttctcttaaagagcaaatagacaaaatgacctaactaattattttaggagacagtctttaatgcagaggggcctccaaatattcttagtttcctagaacaaagtaagccctggttcaacagctgactggacttcctgtgaaagaaatttagtctgccatgcctcagctgcagaagtcagacatgagaggattcttcccatagagaagacttggtctaatgttggttcaaacttagcttgatagccatggcaaatgaacactctttagttgctagaagagcaatgttaaaatttcaggtgtttcgtgtatgctttacaaagtgatgaaaaataataacaatttttttaaaaaagatgatagctgagaggattaaagatgttgataaatacagaaagtgcttagaacagtacttgcatatatgcactgaataaatattagtgaaaataaatattagctataacaataaatattgactatatattattagctataataagtatttacctataataaccataatacatgtaataatgtattaataataattggctcctgaatcagaaacaaatttcaaatagtcacctctctgaataagttaggtactatctaaaatccatgaaatctgtgattttgaaagaactcatcaggaaactctggttcagtttttacatccatcactcttcagcagatgtattaagattaagtatgaacacagaagaggcactgaatttatttttttcatcttagcctattttaactgttccgaaatctcatgattagagtaaataccttctgtgatggatgcttatttaccttcttgataaagtcaactggtaaatctctaattcttataaatcagaagccagaaaaatgtctcaacctgaaaattaatgcttatttccattttctactaatattgtgaaaatccagggctaaaaactggtttctgcttcatttttccagcaatcgtaaaatgtttctttgggtaaagtgggataaattttcagagaatttgaccctcaattctgtgtgtatttttcacacttaagacaatcttagaaacttcacatgcaggaaatttaatttatttcatatagaagcattggctgaaaattataacataaaccaaaaacaaagaatagagctggcttaaaaatgttgaattaacagactaaaatatatttatactataatataaacatataattaggtaatttaaactaagcattgagattcataatgacccaaagtctgggggtagaaaaagagctttcttttcttctgttttctatacaactcagagccaacctgggaatctgtcatggacagttatattcaccaccaagcatgtgtccttctcttctgataaccacaattttccttgggggatttaccctctcattactcgtagttcctgtgcttgggaggagtttcttgcctatcatctactgggataggtatatgaccaaaatctggtgctgtcggtggcttctgagatggctgcattgattcttagttccttctactgaaggctttgtgcaagtccctcccacttgaataactttcttctaattaatagcatacctcaaaattgggaagatgtcacttccattattagattacaaagttctgactttgatcttactaagagatcctcttccttgctggtttactaggagatcctcttccttgatgaagcaagattctatgttgaggcccgtgccaaggaattgaagaaaatctatggccaacagccatctaagaaaggaggccctcagtccaacagatcaaaaggaactgaatcctatcaacagccatgtaaatgaactttgaagtgtatctcaggatgagccttcagatgagccccttgccctggcctacacattgactgaagctttgtgaaagggcctgaagcaaggacccagttaagccatgtctagattcctgacccacagaaattgcgagattataaaatgtatgctgttttaagctgctaaattttgtggtgatttgttatacaacaatagacaagaaatgcatctgggtgctttttatgctcccctggccaaaatgtttcattcagagttgaccacatgatccaactcagtacaataaaagttagggtctctctccctctgctgtacacacagggcataagattgcaaagacttaatcttggtggtattggaagtcttacttgaaccatttggagtctgaaaaggaagccaacatagagcataatagagtagaaaaatggaaagaggctggttcctaataaccttttttgagaatccagaatcaagctgcaactgaaacttgaatttcccttggatttttggatatgcccctttatattttacaaatataaaaaaattatattttcaaggtatatgtttttgcttaaaacaatttgagttatgaactaatatactacatcatgaaatagtcattgaattcctcttcttgcttttgtcttgcaaataatattttattctctctataaaacagtgattaattgttaatagagttaagaaaactgatgctcaatgaaggaattctctacttcagtacctgtggagtctaagataaatttttaaaaataaagtgctaaaaatcagctcagtagcatttacatagctagctgatgttggatataagaacattgacatggatttgaattgtatagtcacatgcattttgttttttaaaataatatagagacaaaatttccaacatgttgctttctactgtgtccacagaacccttcattctatgctgaattctactcaaagccaaataacatctttaagtttccatggacattgagcaaagtttcccagattctaccgtggttgtgttacaagttaagtattccttatccaaatgcttgagaccagaagtgtttcaaattttggaatatttgcatatacataataagacatcttgggaaagagacccaagtctaaacatggaattcatttgtgtttcatatacatcttgtacacatagtctgaaggtaatttaacacaatattttaaataattttgtgcatttaaataagtttgtatatcttgagccatcagaaagcaaaggtgtcactatctcagctgcccatgtggacaatctgtggttgtttggcatcatcataattcctgattctgaaattatatgctactgataagcaatctttttttatacttactcaacacaagtacttcatagtaaaaaataggacataccattaatacaggaaaaaataatgtgttcaggttagctaatccgcatagtaccatcaccagaatacctgcatcagctgttgaagaagagcaacaacaaatagttgcaggcttccaggctccacctacgatgctgtgttttgattgaaaggtttctgtacactgtgttttattttttatttatttacttatttttaattttacttttgagaccgagtcctgctctgttgctcaggctggagtgcagtagcatgatctccattgactgaaacttctgcctctggggttcaagtgattctcctgcctcaccctcccaagtagctgggattacaggtgcccatcaccatgcccggctaatttttttgtattttcagtagagatggggtttcaccatgttggccaggctggtttcaaactcctgacctcaggtgatccgcctgcctcagcctccctaagtgctaggattacaggtgtgagccaccacacttggcctgtgttttatttttttaggtgggaagaaacatcagacacaggtgagagaccaggaagtgggtcctccagggatcaggaggcattctactggttggctttttaaaatgtttcctccagagtcatttgcctcatttacaatgttttttgtcttttaagtttctctttgatttcataaactgacatgatttcttgttatgaatgcatgctgctctagaccttcaacaagtccatcacacattttcaccatgtcattataggcactttttcctcagtatgaatgtcatcttcatcattactacgatcatgatcaccttgattcagaaccatttcagctgcttcaggattggtcaatgaatgcacaaatggagcctcaatgttaaaaaaacttcattgatatgcacttctaccagcttactgattgatatagtttgaatgtcaaactatatcatgttgaggtgtaatccctagtgttggaggtgtttggatcatgggggcagatccctcatgaatggcttgggccatccccttagcgataagtgagctctcattctcagttcacatgagatctggtcattaaaaagtgtctggcacctcctcctaattatctctctctcgatcccattttctccgtgtgagatgcctgctccccctttgccttccaccatcaataaaggctccctgagagccccccagaagccaagcagatgccagcaccctgcttcctgtacagcctgcagagccatgcgccaattaagcctcttttctttataaattacatagtctcagatgtttctttattgcaatgcatgaacagcctaatatactgatagactctgaatgcatattttctgcatatgagaggaggtccaaaatcatttttttcacacttgacatatgggaatccttcaaagtaccaatttgttcatcatcatcactgaacacagccatagacaacaggttgtaccaggcatgcaaaactgtctttagtcactatgttccaagtcttggcaacagcatatacagtattcttcatgttaaactcctttacgaaaacgtccatgcccatacctctgttccctgacgctagcatgctgtttaataaagtgtttttatatttccttttcattgacttaagggtaccctaatcacatagctcaatgaatgaagtcacatttgaggaaaattgcatgacataaacttttttttatgagaatttcacctggaggatgagcagaacagttgttaaggaataacaaaatattgcagttgttattcagtacagcttccatgcagtgagcatgagccgctggtacaaaatgtttgtgaaatcaatcaggaaacatgtccctgatgatctatgtctttctgttagcataataacagaatggtaagaaattcactccttgaaaacagcagggacacaagcttttgcttaaaacagcaagtttacacttatgtatgtctgctgcattagcacatcccagcagaggtattacccttggcctccttaattcctgtctaggctgtctcatcagctgtggttagtgtcttcctggggcaataatggcaataatgccaaaacagtgatgtttcatcagcattatagacttgttctagcatcagattttcacaagtgatgaccttggcaaacttgttactaaatttttttttcactgctttgtaatcagcagatgctttactaccacaatctttacaagtctaatgctgtgtctcttcttgaatattcatggttaacttcaattttcagttcattgtgatagatctttgtttgtttcataatcagaataccattaagtggcacgtgttcactgcaacaccaacagatccattccttccatacacaattgagatattccattttggctttatgcagtgtttttctatttttcattatcttctgctcatcactttcagtatagaacttgaacagtttatcctgctatttcctcaggtcatatccagggtcattccaacgccatactcttctgtaagatgcttcacacattcaccaatatccaatttctccaacagcttggctttctgtggcatagacaaacattaattcttcctctttttaaaatcatgattatccatacccacaggggtgtctgtaggccatttggactctttcaacaatatctttttaccacgaagcagagattaagcaaaaaatccacaatgggtaatgcacatgtcttggccccacacaggacatcatggcacctcatggggaacctgctgttggcatatccaattaacacacatgctttcttattacctttgactggcaggcttgttgggggagaggaatctgggcaggcatgtgaatatgttgcaattgaagagggctgggggccctttttacccttggggatgctgaataaattaaaataatttcaggcactatcaactttgttgttgtatttataacaatgcagggaatgtttccccaaccttttaaatgtttgttccctattgttattatatttttctgctttgttcattatttattttatatcaaatatggtttcattgaaaataactttatatgcataatttgcctaatagatcataaataacttaagaccattcatgtaataagataacaaaaataacaatatttttgtagttttagacgtgctttaaataaaatagtaagaacaaaagttcataaaatcttatcgaggtcaaatgctagcccagttgttgatccaaaaccagatatctcttcaactcaccctaatgaactatcaatgactaatcataaaattgggataataaaaataatgctttagcatgataaaggaataccaaatatagagacaatgtagaaaaaaaggttagcagtaataaaataaaccttggctataacattcatttctataaactatagtaattatctagatcaaatacatattatggattgactaagtgtgatgatagaaaatgggcttaggaaggatataaatttagttgaggccgggcgcggtggctcatgcctataatcccagcactttgggaggctgaggtgggcggatcacgaggtcaggagattgaggccatcctggctaacacggtgaaaccccgtctctactaaaaatacaaaaaaattagccgggcgtggtggcgggtgcctgtagtcccagctacttgggaggctgaggcaggagaatggtgtgaacccaggagatggagcttgcagtgagccgaaatggcaccactgcactccggcctgggtgacacagcgagactctgtctcaaaaaaaaaaaaaaaaaaaaaaaaaatttagttatctattttaaggaataaactgaaaagacatgcattgtgtcatttaccttaacaaacagtttacaagagtgccatgcattctctttcctgccatccttcttgacttcaatagcattttgtaaaagatgatggtttagggccatgtaacagctggcttagtatattagctctaggaaattttcttaacaaagagcagactcctaattatgtgaccatgggaaaaactctctatgaatctcctttctcatctataaaattaggaaaatctgtaaagtgagtacctatataatagggttgttgacagattaaatgtgataatacttaacaacagtgctgacatatgataaatcctcaataatgctaactgtaattactattataatatcactgtgactattgttatttattattagtatcatcaaaattatttggcatttaaggttctccatcatttgggcttaatcaaccccaactgcatttataataaaccctaggctgtaacattcatttctatgaaccctttcctccttgttatgagaatgcttccttctatttattcattacctgcctcatggcttcttgcttccctgtttttgttcatgctatcctttctacctataataatctgtggctccctcatcctttttgccaatttcctcctggctttgtgctactgatcctttgaggtcctttcatctcctcagcaagaatttctaggatacttccagttttcttcttcttataaactcccatagtacattatttatgcctcttacaaggcattttaaacttttgatactgttaaaaatgtacatatacattgcatatttttcacaagactttaaacacctagatgatggaagccatgtcttaaccatctctgtgtcccacacagtacctagcagaatgccttgcacaaagggggctaaacagatattctaaataaatggtgattataggaatcagacatgtaatttttgcttcattagaagaatcttctaattaactggactaagcagtgcttactttcccaaaaagttgattatagagactcactgttggaggtttgtttcttaggtaatcaaggctgatcactggatttctttgattttcccaagattggggctaatgcctgaaattggggaaagttctttgagggaaagggtttttttttttttttttttttaatctgaacgaaatttcaaaaaagggaatgcttcttacttgaccaaaattgaaagcaccatgggataaaaatttctgagttatgagtctcaggggtccaaacacaaaaccccaaagcatggcctcttggtttgctgactactttgaactgaaggacactgaaagtgcctcagaagcaaggtctttctgatcctctcctgccttctttctccctctccactttctcccccaaagcaagccataaaacctaggaaggtctctgacctcctcccctccctactgactgtcctcatatgacagatgtcctgtcccatatctggggtgaatctgaacaaacaggcctaagtttctccccagtttacatccattagagtatactgttttctccaaccatacttctacatgactatccattcttcatcaaatctaagcataaaaatatagctttccttgggtttgtgggtgttcatttctgaagccttgtgtgtcacataaactttggttaaataaattcgttatgcttttctcttgtcaatccatgttctgttatagggatgttaaccatgatccttgcgataagttaggaaaaagaagccttggcttttttttttggctcccaataccttgctcacagaataaaactttataatttctcataatatgtttttcttttgaaagccccaaccatccactgagcttgaaatctatgttttatttctgaaggctcattattctagattttagctttcatttggacaatgatcaaagagaaacaactttcacagcctcaaggtaaaagattgtaaacagcaaattagtgaacaaaagtatttttctttagttttatcttaaatgtataagaacaaaaaccaagatggccttcacaagagaaaatattccttttccaaataatattggctaatttgaaattttcatattcaaacaaatttaattttgtgagtgggaaaaacattttttcaagagaaagttttaggtattttcttattttttatttttttgtgggtacataatgggtgtatatacttatggggtatatgagatttttcatacaggcatacaatgtgtaatgatcacgtcagaataaatggggtttccatcaacagaagcatttattctttgtgttacaaacagtccaagtacactcttttagttatttttaaatgtataattaaattattatatttaattatataactaatgatagttaccctgttgtactatcaaacaccagatcttattcattctttctatttatttgtacccattaatcatctccccttcctccttatcctcccactacccttcccagcttctggtaaccatatgtattagtccattttcacactgctataaagaactacatgagactgagtaatttataaacaaaagaggcttaattgactcacagttccacatggctggggaggcctcaggaaacttataatcatggcagaaggtcaaggggaagcaaggcacattttatatggtggcagggcgtagggactgccacacacttttaaaccatcagatcttgtgagaacttgctatcatgagaacagcatgggggaaaccacccccacgattcaatcacctcctaccagttccctcccccaacacatggggattacaatttgacatgagatttgggtggggacacagagccaaaccatatcatcatcttactctctatctccatgagttaaattgttttaatttgtagctcccacaaataagtgagaacatgcaaagcttttccttctgtgcctggcttattttacttaacataaggacctcctgttccatcgttgttgctgcaaatgacaggatctcattctttttatggctgaatagtactccattgtgtatatgtattacattttctttatcaattcatctgttggacacttggttttttccaaatcttggctattatgaatagtgctacaataaatgtgggggtgcagatatctcttcaatatattgatttcctttcttttgggtatatacctaggagtgggattactagatcatatggtagccctacttttagttttttcaggaacctccaaaccgttctgcataatggtggttctaatttacgttcctactaacagtgtacgagagttcctttttctccacgtcttcaccagcatttattattgcttgtcttttggataaaagccatttaactggggtgagatgatatctcattgtggttctgatttacatttctctgataatcaatgatgttgaacacacttttatatgtctctttgccatatatatgtcttcttttgagaaatgtctattcagatcttttgctcagttttaaatcaaattattagattctttttcctgtagagttgtttgaggtccttgtatgttatggttttaatcccctgtcagatggagggtttgcaaatattttctcccactctatgggttattaattatatgaaatatttagaaagaaaacaatagttgcatccatatctgaaaaatttagagacactgatgacatgatgaccttcattccctaatgtttttatggatgatctagatatcacaagacacattaaagaaactacactgtagggaatattcaacagttggattgagcttatgcagcgtttcccaaagttttagaaattccatcagataacaaaaggaataatgtccaataagaatcattggtcttaggtgcagtggctcatgcccgtaatcccagcactttgggaggccaaggcgggcggatcatgaggtcaggagtttgagaccagcctggccaacatggtgaaaccccatctctactaaaaatacaaaaaattagccaggcgtggtggtggtcgcctgtaatcccacctacttgggaggctgaggcaggagcatctcttgaaaccagaaggcggaggttgcagtgagctgagatcgtgtcactgcactccagcctgggtaacaagagcaaaactccatctccaaaaacaacaacaataacaacaacaaatcattggtcaaggaagtttgggaaatagagggcaaagcaggttaaacagatttctttaatgtagatccctgagactttgacatactaattttcctcatgaatctccaataagggttatacggcattgatgtttcctgacctcatatggccaaggattactcttgacttttttctgtcagagcaccttgaaggactgacaatctatgaagcacattttgggaaactcatgtctaatattatatacaaaggaggttaatgacaatatgcaatgaaaaattaatcaaaatgcagtttcatataaatcaaatatacatttcacttataatatcaaatataaaaaagacatagtcttgaagtaaaatgagccttatcatctcaaatgggtaatctggatattaattcacctgttgtttagaatcttattcattaaacaagcactcagtttttaccttctttgtgacaagcactgtgttcagtaccaagataataaaagatgatagtaacacaatatatcttcccatttagattgcaattccacagagttctaaaggtactttctttggcaaaatagttcaaaaaatatgtcaagagactatatcaataagttattgagccatagactattaaagaagtgggaggtcaatagaggagagataagaaggtttcatggtgtgcaagattggaatttggcctagaggactgataggaggtacagtttagctccatttgggttcaagcatagaacatgtacagaataaagaaaagacttagggctacaagttcatattagaaacatcccctagacctagagttagagatctagattccaattccagttctaaaagtcacttgctatgtgaccttagctatcttgtctatctatagattatggaaaataatgcctgttttgtctatttcaaaatatcattaggagaaaacacctatagatagcatagtatgttgttaatttttggagttcaaactatatttatctaagttcgtcaagagttagtgcaaagcattgcttacaatgtatcctcaatgaacatttatttcatgaaagaatgaatggataaaagaagttagacctgaatttcctctgccacttactaactaggtcatacatgaccttagttaaattacttagtcaccctgagcctcaggtttcgtatttctaaaatgagggttaaaaattatgcttatatcacaagattgctctggttaaatggaaattgatgaaaaattcttagcacagtagttagtatatacttttcatcacatatacatcctatatattggataattaaagacaattcatcaaatataaagtacagtgattgtgtttatgataaaaactatcacatagcagagaaggagaagtgagtgttcaacatgtagttgtgaactgacacttttggtccaagagctgcatcagaacacgatgagtgacacacaatgtgcaccataacatcaccaagaatgtgagtttaaaaagtatcagatcattgactgattcttcagaaggatcctagattaccatgccatttaaaaatatgtgtaagaaaagcagagctcaaaaattatgtatgagaggctttccagtgtacgttgagcctcaaaggaataaaataaactgaaatttagacatttactcacaacgattggtatagctcagaggtgataatctctggaaagagtattgataatgttaatcattttatagattttaaattggtttgtgttctactgggaaccaaagaagatgtcatgaaggtggctggcaagatggacgaataggaatagctctggtctgcagctcccagtaagatcaatgcagaaggtgggtgatttctgcatttctaactgaggtacccggtttgtctcattgggacggttagacagtgggtgcagcccatggagggcgagtagaagcagtgtgaggtgtcacctcacctggaagtgcaaggggtcgggggactccctcccctagccaagggaagccatgaggaactgtgcagtgaggaacggtgcattctggcccagatactacgcttttcccatggtcttcgcaacctgcagaccaggagattcctccagtgcctatgccacaagggccctgggtttcaagcataaaattgggcggccatttgggcagacaccgagttagctgcaggagttttctttcataccccagtggccctggaacaccagcgagacagaactgttcactcccctggaaagggggctgaagccagggagccaagtggtctagctcagtggatcccacccccacagagcccagcaagctaagatccactggcttgaaattctcactgccagcacagcagtctgaagtcaacctgggatgctccagcttggttggggaaggggcgtccgctatgactgaggcttgaataggcggttttcccctcacagcaaaacaaagctacaggaagttccaactgtgcacagcctactgcagattggtaaagctgctgtagccacactgtctctctagattcctcctctctggcagggcatctctgaaagaaaggcagcagccccagtcagggccttatagataaaacttcatcttcctgggacagagcacctggaggaaggggcagctgtgggcacagcttcagcagacataaatgttcctgcctgccagcgctgaagagagcagcagatctcccggcacattgattgagctctgctaagggacagactgcctccttaagtgggtccctgacacccatgcctcctgactgagagatacctcccagcaggagtcgacagacacctcacacaggagagctctgactggcatctggagggtgcccctctgagatgaagcttccagaggaaggatcaggcagcagtctttgctgttctgcagcctctgccgctgatacccaggcaaacagggtctggagtggacctccagcaaactccagtagacctgcagcagaggggcctgactgttagaaggaaaactaacaaacagaaaggaatagtatcaacatcaacagaaatgacatccacaccaaaaccctatcagaagtccaaaggtagataaatccatgaagatggggagataccactgcaaaaaggctgaaaattccaaaaatcagaatgcctcttcttctccaaaggatcataactcctcgccagcaagggaacaaaactggatggagaatgagtttgacgaattgacagaagtaggcttcagaaggtgggtaataacaaattcctccgagctaaaggagcatgttctaaatgaattgctaactagaataaccagtttagagaagaacataaacgacctgatggagctgaaaaacacagcacaagaactttgtgaagcatacacaagtatcaatagccaaattgatcaagcagaagaaaggatatcagagattgaagatcaacttaatgaaatcaagcatgaagacaagattagagaacaaataatgaaaaggaacaaacaaagccaccaagaaacatgggactatgtgaaaagaccaaacctacgtttggttggtgtacctggaagtgacggggagagtggaaccaagctggaaaatactcttcaggatattatccaggagaacttccccaacctagcaagacaggccaacattcaaattcaggaaatactgagaacaccatgaaggtactccttcatgagaagaacaaccccaagacacataattgtccgattcaccaaggttgaaatgaaggaaaaaatgttaagggcagccagagagaaaggttaggttacccacaaagggaatctgataagactaacaacgtatctgtctgcagaaaccttgcaagccaggagagagtaggggagccaatattcaacattcttaaagagaataattttcaacccagaatttcatatccagccaaactgagctttaaaagtgaaggagaaataaaatcctttacagataagcaaatgctgagagattttgtcaccaccagttctgccttataagagctcctgaaggaagcactaaacatggaaaggaacaaccggtccagccactgcaaaaacataccaaattgtaaagaccattgacactatgaagaaactacatcaactaatgggcaaaataaccagctagcatcataatgacaggatcaaattcacacataacaatattaaccttaaatgtaaatgggctaaatgacccaattaaaagatacagactgacaaattggaaaaagagtcaagacccattggtgtgctgtattcaggagacccatctcatgtgcaaagacacacataggctcaaaataaagggatgggggaatatttaccaagcaaatggaaagcaaaaaaaaaagcaggggttgcaatcctagtctctgataaaacagactttaaaccaacaaagatcaagagagacaaagacgggcattacataatggtaaaaggatcaatgcaacaaaaagagctaactattctaaatatatatgcactcaatagaggagcacccagattcataaagcaagttcttagagacctacaaagagacttagactcccacacaataatagtgggagactttaacaccccactgtcaatattagacagatcaatgagacggaaaattaacaaggatattcgggacttgcactcagctgtagaacaagcagacctaatagacatctacaaaactgtccatcccaaatcaacagaatataaattcttctcagcaccacatcacacttattctaaaattgaccatataattggaagtaaaacactcctcagcaaatgcaaaagaacggaaatcataacaaacagtctctcagaccacagtgcaatcaaattggaactcaggattaagaaactcactcaaaaccacacaactacatggaaactgaacaacctgctcctgaatgactactgggtaaataatgaaatgaaggcagaaataaataagttatttgaaaccattgagaacaaagacacaatgtaccagaatctctgggacatagctaaagcactgtttagagggacatttatagcactaaatgcccacagcagaaaacgggaaagatctaaaatcaataccctaacatcacaattaaaagaactagagaagcaagagcaaacaaattaaaaaggtagcagaggacaagaaataactaaaatcagagcagaactgaaggagacagagacacgaaatacccttcgaaaaatcaatgaatccaggagctggttttctgaaaagatcaacaaaatagaccactagccagactaataaagaagaaaagagagaataatcaaatagacgcaataaaaaatgataaaggagatatcaccactgatcccaaggaaatacaaactaccatcagagcatactataaacacctctacataaataaactagaaaatctagaagaaatggataaattgctggacacatacttcctcccaagcctaaaccaggaagaagtcgaatccctgaatagaccaacaacaagttctgaaattgaggcaggaatgaatagcctaccaaccaaaaaaaagtccaggaccaaacggattcgcagccgaattctaccagtggtgcaaagaggagctggtaccattccttctgaaactattccaaacaatagaaaaagagggactccaccctaactcattttatgagaccagcatcatcctgataccaaaacctggcagagaaacaacaaaaaaagaaaatttcaggccaatatccctgatgaacatcaatgcaaaaatcctcaataaaacactggcaaaccgaatccagcaacacatcaaaaagcttatctaccacgatcaagttggcttcatccctgggatgcaaggttggttcaatatatatacaaatcaataaacattatccatgacataaacagaaccaatgacaaaaaccacaattgtcttaatagatgcagaaaaggccttcaacaaaattcaacagcccttcatctaaaaactcaataagctaggtattgacggaacttatctcaaaataataagagctatttatgacaaacccacagcccatatcatactgaatgggcaaaaactggaagcattcccttagaaaatgggcacaagagaaggatgccctctctcaccactcctattcaacatagtattggaagttctggccagggcaatcaggcaagacaaagaaataaagggtattcaaataggaagagaggaagtcaaatgcctctgtttgcagatgatatgactgtatatttagaaaaccccatcgtctcagttcaaaatcttcttaagctgataagcaacttcagcaaagtctcaggatacaaaatcaatgtgcgaaaatcacaagcattcctatacatcaataatagacaaacagagaggcaaatcataagtgaactcccattcacaattgctacaaagagaataaaatacctaggaatacaacttacaagggatgtgaaggacctcttcaaggagaactacaaaccactgctcaaggaaataagagagaacacaaacaaatggaaaaacattccatgctcatggataggaagaatcaatatagtgaaaacgtccatactacccaaagcaatttatagatacaatgctatccccatcaaggtatcattgactttcttcacagaattagaaaaaacagtgctttaaatttcatatggaaccaaaaaagagcccatatatccaagataatcctaagcaaaaagatcaaaactggggacatcatgctacctgacttcaaactatactacaaggctatagtaaccaaaacagcatgatattgttacaaaaacagatatacagagcaatggaacagaacagagtcctcagaaatcataccacacatctacaaccatctgatctctgacaagcctgacaaaaacaagcaatggggaaaggattccctatttaataaatactgctgggaaaactggctagccatatgcagaaaactgaaactgcacccccttccttacaccttatacaaaaattaactgaagatggattaaaaacttaaatgtaagacctaaaaccataaaaaccctagaagaaaacctaggcaataccattcaggacacaggcatgggcaaagacttcatgactaaaacaccaaaagcaacagcaacaaaagccaaaattgacaaatgggatctaattaaactaaagagcttctgcacagcaaaataaactatcatgagagtgaacaggcaacctacagaatgggagaaaatttttgcaatctctccatctgacaaacagctaatatccagaaactacaaagaacataaacaaattttcaagaaaaaaaaaaacaaataatctcatcaaaaagtaggtgaaggatatgaacagacacttccctaaataagacatgtatgcagccaacaaacatgaaaaaaagctataatcactggtcactagagaaatgcaaatcaaaaccacagtgagatattatctcatgccagttagaatggtgatcattaaaaagtcagggaacaacagatgctggagaggatacggagaaataggaatgcttttatactgttggtgggagtgaaatgagttcaaccattgtggaagacagtatggtgattcctcaaggatctagaaccagaaataccatttgacccaacaatcccattactgggtacatacccaaaggagtataaatcattctactataaagacacatgcacacgtgtgtttactgcgacactgttcacaatagcaaagacttggaaccaacccaaatgcccatcaatgatagactggataaagaaaatgtggcacatatacaccatgtaatactatgcagccataaaaaggatgagttcatgtcctttgcagggacatggatgaagcaggaaaccatcattctcagcaaactaacacaagaacagaaaaccaaacaccatatactctcactcataagtgggaactgaacaatgagaacacatggacacagggaggggaacatcacacactgggcctgtcagggagtagggaactaggggagggatagcattaggagaaatacctaatgtagatgacgggttgatgggtgcagcaaaccaccgtggcacgtgtatacctatgtaacaaacctgcatgttctccacatgtatttcggaacttaaagtataataaaagaattggctgggtgcggtggctcatgcctgtaatcccagcactttgggaggccaaggcgggcagatcacgaggtcaggagtttgagaccagccttaccaacatggtgaaaccccatctctactaaaaatacaaaaattagctgggcgtggtggcaggcaactgtaaccccagctactcaggaggctaaggcaggagaatcgcttgaatccgagaggtggaggctgcagtgagccgagattgtgccactgcactccagcctgagtgacagagcaagactccatctcaaaaaaaaaaaaaaaaaaaaaaaaagtcacatattgtgatcataacagaggtaggtgtttgagctggtactcttattctgagaagcatccattggctttgatacaaattttattgttaaaaatgatttgaaaattgaaaattgtcttgcttgatttccctactatctttgaagtattttcagttcaatactttgaaatatttcagggttcaataaatcaatgagacatatggattatctagggagaatctatttgtttctctaggccattgaactgttggaagcacattaattattcatgatttcttctgattaacaaatttgtactatctgaaatacatgttcagtactattcaatactttattaaaagttatattatttactcctaaaaaccagagttgggtacataattatttcttttgttagcattttagagatataaaaggggcttatttctaataacaacgaagattaaccattacacaaggcattctagaaatgagtggtcataatatcacattttaaataattgaaaaacgtatacaaatatatgttgcccaaaataaagcatgacgtcaaccatctgttataatataacactgcattttcttacattctctaggtaaacattatagggactattatgtaaaaaaattccaaattattctaatagctctattcttaaaaccattaagaagattatctctgtttttaatattcaatataataaatacaatttgagtgcaaaagtttaaaaagttttatactatattttatataataataacttatgctactttactctcctagtattgcaagctaaaatcttttaataccaaagttactgaagaagagaaaaatttttaaattaacactttaatatattctgtcttccatctcttagacaacctgttgtcaaattctggcatctcttcctacttcttcagatttgacttttctttggattcatattgcataccttacacctgcaataaattatatatacctttaatatgcttattccttgtacataacagctatagctactgttgggctcagaacatgataccctgaaatatggcactttggcaattgagaagactgcagaagcaggaaggttgcttttactttctcctccctttttcttctaaagaacattcataaagagttatcgacctatctcacctgaatgtaggtcataagaacctcacaccacacaggtcctaccctatacccagaaactaagaaaaatctgaacaaagaggtcctggtaagttccttccagtttattacaaatagttcatatccactttttgtccaattatacatctacacaactgttcattcttcattaaacttaagtataaaaatacaattttttctggttctttgggtcttcatttctgaaggctcttgtgtcatgcaaaactttggttaaatacattatgcatttttcttgttatcttgtcttatgttgtaggagtgtcagttgtgaaccttgtgatgggtgaggaaaagatacttctttttctttcctagaatactcaatacatgttatatgaatgaattgctcatctgactttcttcctggcctctctactcagccactgaatctctggggacctagtgtaagaagacagattttccatgtatttctagttcttttttttttttttttttttttttttgagatggagtcttgctctgtcacccaggctggagtgcagtggtgcgatcttggttcactacaacctccacctcccaggttcaagcgattctcctgcctcagcctcctgagtagccgggactataggcgcatgcccccacacctagctaatttttgtatttttagtagagatggggtttcatcatgttggccaggatggtctcaatctctttacctcgtgatccgcccgcctcagcctctcaaagtgctgggattacaggcatgagccactgcacccagccatatttcaggctttaaatgaaatggaatatatattttttaaaggtaagtttaaccagaatacatttattcatgggaatttttttatttacacccatttgaagactaagctacatttgaaattgatatcatattgcataaacatatgaatacatgtatttgtctaacataaagtcttcaataaatatttagtgaatgaataaaagtatgttatactcaacataaatgagtttaggtcatttcctgatgactttgaggggtcacagatgtgctggtgctttccttgacacaactttctcttacccctttagtttaaatatatatatttaattattttaaaaatagagtttcatattttgagttttatttaataaaacagatcatcaaactcataaatgaagcttgtaaaacattttggaatgacttcatccacaaattttgaggaatgaaacaaaaaagaaatggatattaaaactcttaagaggccaatcaaccatttgtgttttgatattattagcaccccaattcaaacacacaaaaggttaaaaaataaattataaaacaactggggacatttggacatcaagtgggtcttggataatattaagcaattattgtttgatattccattaggtactgtaatggtattttggttattttttaaagttgttatttttacatgcaatatattaacagatgagatgatatttcttagactttcttcaaaataatcctgtgtgtatatggggagtgaatgcttggtatagaaggaaatatggttatttgttgataggttttgaagttgggtgataggaacatggatgttcataacaccattttctttacttctgtatatatttgaatttttcaaaaataaaaaggtttttttaatcatgctaataaaactatcagaggaactttgaaaacattggattcttgagataaagtggctttccagaaaaaaagtggcatgaaataaaatgctctcatactttgtttaactgatgtactttatttaaatatctttactatatattattggtttcctagttagctatgccaatatattagatggtggaatcatgacctatagctagctgagaattttaaattttactgactttattgactccatactcttcatggacactaatttagtcagacaagttacagaactccaataacgtaataaacatgttaagtgcctagtgtattaaatctcttctgaaaatctacctttttgatgattttgagcatggatttctaataactgaatgccatagtgtcaaatgttgatttggtcaaagatactgtttttgactggatcaagcaaaaacacttcccaaaatgcagcagcagcacaatctgttatattgcaatgagaaaaaaaaattggcaaggactataaaagttacttaagaaagaacttcacaaggagatgaagcacaaatggaaatgcctcagaaagtagaatgtagggcaaatttctaaggagatcacaaagaaatagcaaaagcttgtaggagttgggtcaaaaaagctcagcaggaaacaggatgccacatctaagaaacatgaaaggaaacagaaaaaagaattcttttactatttcaggaacaaaagaaagctaaatgacacactttgctccttcagtgaagagaaaaggaaatctaatggtccatgatagtaaaaatgcacatgcaattggtaatttaaaaaaatcctccttaaaagaaagataaagtagaattatcgagcatttattgagaggtgcaaaatttaaggcgcaagaaaatatttaaaaaattaatctaacataacttaaccattatgatgtgatttatatgcaaagatacctaaaggattcaccatccacatataatggaatattatgcagccaataaaagttattattaataatattaaaaaagttaataatatgatattaagtaataaatgccaaatcatgttgttgtctggaagagaatcgtcaaattgtcaacagtagtttttgctgataatattactggtgatttttatttttgtcatctatttattcatttgttggatattctgcaatgggaattacttttataatcaggcataacaataaaaatattattcaaagtacctactgtagtctccaacagttcaattccaagtagtccatttaaaggactcttgttaagttgccaataatcactgctttgataaatcaaatggatacttgctcttatttcctggctctgtgaagcatctgacttttttcaatgttccatgctaaaattctctgctcccttggcttggtagttctaatttaaccatgcatcagctgtcacctggaagactgcaatggctggctgtctttactacaagccattctgtcaattaccaccagggcaatcctgaccacattactccattgcttttgcctcttcaaagacttatcttacagaacatagagggtgagttgctctggatgctttctgtttttttttgtttgtttttgttttttttcttttttttaaattttattattattatactttaagttttagggtacatgtgcacaatgtgcaggatagttacatatgtatacatgtgccatgctggtgtgctgcacccattaactcgtcatttagcattaggtatatctcctaaagctatccctctcccctcccccaagctttctgtttattagtgacccaatgaaaagaaaaggacaactttgggtccagggattgtaaattgtgtcctcaaatctctatttcttgcttctgttctctcttaggtagttgtatctcataagcaaaagagcttcctctcagtgacagggatgagagggcagggccacagataattccaggcttatatcatcctacctagcaaccccaaagccaagggagatatcctctctcccattctctgtgtatgaaatccaaaggaaagtctctggttgactaacagtaccacacctaattgctaaggccaagaatgtgggcctgggtcataggtccaatctgaacggagagatattgtactatgattggtagcctgatcagaactacagcacttggaaggtccaagggtaagtgcttcaaagaaaatcagggataattaataacagaaaagagtaaggaatattggaaagatgaaaaaccaaatatcctttataaaaagtaatattcaatctccttagcccaacactcttagaatttcttggattggcctctgctcatgtttcttgcctcatctttcgccattccctcccaagaactccagtttctaactatgccaaacacttggatcttttctgaataggcagtgctaggcagaatagtggcccccaaagatgttcatgccttaatcctaggaacgtataaacatgttaacttgcaagacaaaagatacactgcagatgtgattaagattaaggactttgaaatggaaagatcatcctggtttacctaggtgggcccaatctaatcacatgagtcctcaaaagcagagaatctcttccagattcagataaccagaaatatggcaatgtgaaaagaactccatccaccattgctggctttaaaaatggaggaagaggctacaaatcaagaaatgtgggtggcctttagaagctggaaaatgcaaggaaatggattttttttgaaagcctacagaaagtaatgcaatcctgttggtattttgattttagctcaatcagacttttgtctcactttggatctattacagaactgaaagataataaatttttatcgtttaagcttccaagtctatggtaatttgtcacagcaataagaagaattatacaggccattctatgtcatgctttcttgattttgtactttctggtcatttcatgtaaaatatctatcttccacatctatcttccacactgatgcaccccgctcaatcccagcccacttggtgaactccctacccttattcaaactataactcaggtttcactccttctctaaagccttccttagcatcactcctaggaatatgtgactcctaggaatacttttttcttatggccacacagcactctgcattcttccgctatagtatttaaagtgctgtatgaaatttgtctcagactgtaaatttatattaggccagggactatatcctattcctcaatgtatatcacaggtaaagcatgttgagcacatagtacattttaataactgcttgtgtatgcatgaaaaatcattgcactggttactcactttgagatttatataggaatgagaaagagttgaaaactgaaaaaggtccagcatattttaaaaagagaacatgaatatagcactagggatttaacttctactgccacaaaaatgttggaaatcaacgagtagtaggtcaattgtcaaataacttgaggatagcaggtacatttttattatgagcaaatcttgtctaaattagttgtctaaactcttccttctacatcagtaactgaactgataaatttgggagtaagaaattggttgtaatcaatctttcttgatgtgacaaggctttagattgaattctaaagatcaatgaacttggaaaatgtggtctcttctctaatggcattaattaataacatctaatattatcacctagaatctggccaatacatttacatagaatcagcctgcaagagggtcctcaaatgattcttggcttctcatattcactcccttatgtagtccctcccaatactgaataggtctaacctgtgtgaccaatgggattttgaaaaagtaacaatgtatgatttctgaagatagatcttaaatgaattgctggttccaccttacttttttgaattgctcctacttctaggggatgatagataccatgttgtgaggacactcgagcggtcctgtggaggggcccattagagaaaaactaaggtcttccagcaaaagctagtactaaattgccagctgtttaagtgagccactttcaaagcagattccccagccccagacaaactttcagatgactgcatccctggccaattttttgactacaacctcataagagaccttgaacaataattacttagctgatccactctcaaattcctgacctgcagaaactgtgagaaataaataaaagtctattactgtcttaagtcatgcagttttagataactagttttagataacatgcagcaatagataactagtattctgcctatagaataaaatagacaaaagtcactataaactatttcctgtgttgttagccgtggttttttaaaaacaattattatcctttcactttcagccctagtcttccaaaccaataaacaagagtcttagaaggaagataacttcaaggcacatctgctccttttagattttatactaaaaacaaaataaagagccagtcttattactctactgccaattctcggtaataagtgacatttcctcctcccttgtgtctgtatttttttctactattgaggcacctgaaattggatgatgagatttccaatgtgcccttagaaaatgagaaagacatgacacactgtaactctcctccttataaggctcaggaaagaaatatacctttttgggcctctctattttcctgacagaaaaagagagagagatagaaggtagaaaagctatctgccatccttcagctatgatattcctgaggctcatcatatttttcttattttagagagtctgtagagggacacgtactcagtgtgttatatttgctcctttatgtgtgaccatcacagagcaaatgtcttgatgtcatctcatcaaaagcatcagagatgcttggagcagggagaagaaagggggtaggaagaagagagtgatgaaaaagggcaaaggaagaacaggagagggccaattgtgtagaaacagcaaacagcctgacttgttcaggcacaggccagaactgctcctaggctgttgagttaacacagatacactctggttaatgctcttaagaagatgaattaagtgaaacatttcagttctaacaaaagtggttcctgcaaaaaggagagatggggcacaactagaagaaaaatacttgcattctagtttagttcagtctcttcagagaaggtaacatattacagtggaactacatcataaggtaaatttcaaatcagataaaatatttatgattttgagaaaacatttcacatgaatctataaatacctagcctaaggtttactgctaccatcgtttacaggttaattagcgcattttgcagccttgccataaatctgcttccatttagatagaatggctagatggttgtctttagcatcctgaaatttaatagtagaactatgtagcagattctagtctttctaagcaggaatgacaaaatagtttcaaattattatttttttgtcatcatatgactggtaacatgtcattggcacttaaattttatgagtgtctatttattaggctacagaaataattttgttctccattgctctatgtataggtggggaagctagtgacctcttcaggggtggtttcagaagttaagggggtgtagccaaaacctggtgttatctccttagcttgtctaaattcaggaaagtcactggagaataaaaaagaaccaattttactataagacaatgaagattctaggcagttcttagaaataggtaagaaatctaagctccacaagggcagaagtctttgctctttttctttcctatgcactcaacaagaatttcttgactgtatgaaggagccagggaatgctcagaagaatctgtgactcatcaaaaggtaagaggcactgctgaataaggaaatagagtggagactgcctctctatggagtgccatttgagaagacatctgaaagaaagtggagacacaggctacctggaggaagcatgtagcaggcagtgggaacagcaggttaatggccctggtgtggcagtgagcttgacatgttcaaagggcaataaggagggctttgacatgcaacagagtaagggaagagagagtggcaggaaataagcaagagaggcaggtgagggcctgatcacgcatggtgtaggaggtcatcataagaatgtaggattttattctgaatcatagtaaggtgtcattgattaaagaatgtggtcaggccagcagaataagtattaatagtccatgacagtgacagactgtctttgaaaaacattatttcctgagtggaaaaaaaaaaccctagaaactgaagatacagtcaagtatcctatgagtactgaataaatactcttaactcactggtaggtggatgtgtttgaaaatgattactaaggaacatactgtgttattattcaagctatcatgatgggtatagatttagttttttaaagaaagcttcttatttctggaacagttgaataaatttattataatttccagagacccagtccttaagcatggagttattttagtgtaatgccaacacgctcctgtcttggtttaggtgagctttcaggtgtgcaggcaatttgcatgataaattttgcatgtatacatctcctctctcctttgctgcaaaggaagccaagtagtaaacagtctttcttagtaaatgttttgctgaaagaaaacacacatttacaagtcaaatcatgtgaaatctttgataaggaaaggatgatagcaaggtttattttacagtttatgctgaaaattttactgggaagaaataactaggctggttatttccagttacacaataagcagttactttttaagagctactgtgtaaaataaacactgctaagtggttgtaatatttgacttcattcattcattcattcattcatttatattaactaacatctattatatatgtaccatgtaccagggcactatgctaggagccaaaaataaaagaaaaattttaattacagctacaaataatccacagtctagaagaactcaacagagtacattggcttcttctaattccaaataaaaatagggtcagcatatgtcttcacactatgacaattggcaatagactgttaagcttcggctttctctttctatttcctcttctgcctttctgctgtgactttgtaatcaataggactattagcttaactggatacatcagctaataatccaacaggacaaatgcataattcttagaatcagtttagatggttgcccgcagcccccttctactcatcctctgaaaatgctgtagagttcactccagtgacctaccatccataaaccctctgtggctgttcagatgtttacacacattggctacttcacagaaagtcctatctctctgttaaaagagaaagtatatgtggctgaaatgatggttagttctcatttcagtacttggacgtcaagcagttagtttactgttgcttttgtaacttggaggcattccattctatactgaacacttctttggataaagttctcatctttctaacacattgttagattaaaatagtaatggaaaagtaataatctctccagcctacagacagctcttatgccactacatgtctatagtattgatataacatttttataacatttctgtttcagttatctattgctgtataacaatcaacctaaaacaacaaacactttatttccttgtgatattacaatttgggctaggctcagccaagtgcttcttctgttagtcttgtctgaggttactggtgtggttgtataccaccagtcatgccacttggggacactaggacatctgtatttgtctttattcctgtagtctcaggcttctccctctccaagtgtcctacatcctctccacactctctttctgcaagttggatgagcctcagacttctcaagagttccaagacttgttaaagcttagccccagaattaaaatacattacttctaccactttctattggtgaaagcaagtgaaagagccagcctagattcaaggtgaggaaaccacacaggaatgtgaatacttacaggcatggttcagtggaggtctctaatgtaacaactacacctaccttgactcaaataatctgtaaacctgcattagatctttagattgataaagagtttcaggagggtagggtgagctccttaccaaggggccatgatcagagtcctacctcttttgcgttgcatggttccaacaacacttcatttctagaagtcatcttacctttactcatcctgggccctttgtctgggacagcttttctactttctgacatctattgaagtctttcttctcaaaacttcaagctcaggctttatctcctgccagaagcctttcctgatgctttcaggttctgttaagacctgcttctttctttttttttttttttgagacggagtctcactctgttgcccaggctggagtgcagtggtgtgatcttggctcactgcaagctccgccctccgggtgcacgccattctcctgtctcagcctcccaagtagctgggactacaggtgcccgccaccaagcccgacaaatttttttgtacttttagtagagatggggtttcactgtgttagccaggatggtcttgatctcctgacctcgtgatccacccgcctcagcctcccaaagtgctgggattacaggcgtgagccactgcacccggccaagacctgcttctgagattctaaaatatatcctgtgtttatctctttcacggaacttattatattgtagtaaaatgtctgggcatttgtttatgagtttgtttcaccagctagactgtttacaatctgaagtcaggcctgagtcttattaatgtgattttgtcattctgtaagtgcccagtaataacatgttaaaagggaactggaacaggagaagtgtatgttgtataatctgatgtcaccccaaatccagcataattcaatgcatatattagtggcttaataaatattggacggttggttgaatacataaatctatttctgttagtcactacataagagatataaactcttattttggtaacctggtaaattttcagcaagcttcataaacatttcaattcctagctaggaaagaagcaatatgccttgggcacaacttttcaagtaatatcaatgtttagcagcatcaacctttcaggcaggtgtaaatagctaaaaataaaaattcatatccttctgaaatgctggctaaatttctgaaggaatgtattcatgctctgaaacacaaaaccgttctcttgcttctataaaacagaacaaaacctgtgggaaaccaaattactttgctaagtgtgacaaatccaaactgctacagagcaagagataacataaattaatgggtcttggaggcaaacaccaggagttattttgaggtgagtgaaatccgatctccatcctaaaaccacactgtgtttccatggatcaagtttttagttttatgctttttagaaaactatttatgcacaataattacagccacctgaatgccctaaataaacgtagcccagtaaatgcaggcgtgtgcttgaatggtgccctattgctttcaagtactttgtagtgggctgcatgtctgttttgacgattcccccctaaaacctaaaggcagagatgctggaagggtttgcattaccaggtgacacagtgcttgactttgataagccgttgctaaggcaaagaaactcctaaagccttattgagggtagcccgtggaagtctgtcacactgtcttatattatttttctttggatacaagccatttttctaatttaacccttgattttcttgagggcagtaaagttgtcttaggttcttttcacacagagagtgtttagaaatgtttgtggttgaaatgagtacccttctggattatgtttaccccaaaggagatgcattattttattttaatcagtgttaaagataatgtataggaggccattggataccactgagctcttgtaccaggccccccccaaaaagaaaaacaaaccaaaatggagtcactcatgctaaagttccacatcaccaagcaaaatctaagttgtttttctgaccttccaagaaaccaagagagtgcgagatgatggccaaatctctaaacaagccagttttagctggcaggattagaaattcccctttactttatcctttacaaggaaagtaacatttaaacaatcagtctgctttttgttttctatttttgctttcctcagcccttttctgtgtataaaccaatgtcctcttgctcacctcatcataatggtcattttattttagagaatgaggtactgcctgtccagaactgcaaataaaagcttattaagatctttatactaaatttttttgttgttgttgaaacttaatcttttgacaattctggcaaccaacaaagggacccaaatgacactgctgatgaatcccaagacctcttggggaacgcaggagagatgttactgagcccttttcaggtcccctgtcttcctcacggagccccagtctgttcctttcaggttggactccggtctttttgcactgaatctctggagcttatcagctttcatttgggggttactttgtgctgtaagagagcatttgaccttgaggtgccaagggttagtctgtgctctgagaaggtgcttgacctttgggtttgtgctggctgatgagttactggcaggagctgcagttttaaaggtgactgacaacagttgcagtaagtggttattactgcagggagtcagaactccagcttccaaaattcgtagagatttggtttctatcttcttaattgctttgtcttgagcacttagttgaggcatgcctcaggtgtctgacagggtcaggcagaaactggaaaattattggctaagttggtcaaaggcatctcagtgccaaagccacaatttgatcagtgggcatgatttgggcacttgagagctattagagcaacccaccaccaaaagataagactaccatgaaaggataagctgcatgtaaaatagggtagcacctatcagcctctagaaaatgtccgttcaacaaggtacgctgtgaaagcattatataacccaatgtggcacttccctcttaggctttgatttagactctgagagactcaacattcaatataaagatagttcctaatttataaaaaaactgagcactccacctttcagccacacttgccttttacactttattaggccccggaagcttcaaatacttacaaaaatggccaaatcttactaaagatactttagaatgacaatggccattatatagcatgtttcagatgaacaacactgcatttaagatgtgcatatatcaatgagggttctcaaattaggccaaacccagatgtgcagaagtttctaaaaagatttcaaaaaaaaaatttaatgggctcttttcaaagattgttttacagaaatcaagtgaaaagtttaatgattaattgataagaaaaattaaatctactatccttttcatttagttactcttccaccccgaaggtaaaaagaaagctaaagtgtttctaaaggttaggatctcaggtcaagcaggtttgcttcttttttagagctatccataccgagtccaggcacagagaatgttttctttgccccattctctaatgggctccactctggagtcagtaatgtagttaagaaacaagctaaatggaaaatatagcctattgaactagatcagtctctgaagtacacccttctggcatttagctggctatttggaaactttttgtaaaaaatttacatctataaagaaaaatcactagaaattcttaaagtgagagagagtactggtctaaacaagcctgacctttgatgagtttgtcttaactgggcttcccacctacatctttctttgtctagggtgaatggactcttagaagaatgatggttacgacaaggtctgtctggatttgtagatttcctctcctgtgacaaatgttaatcttccctggttgctggatctgtctttaggcaaataaggaagaatattcagaaaaccctgtcttgcattgtgctattctttaagtgccttcagttcaaagtaatcaatataccaaagtgacatattttggggtgcgattttctgaactactttaatggctatgtagtttaagaagcaattcgagcatgaatgttaagaatgagtaaatttacataaatgtaaatggtataaaagtttatagctgaacttgtcatagtttaaaaagtctttttcagtaactttaactcttaaagtcatgttaaattaatagatatttatgaaatatcagtcattcttaacaaaactaaagtattaaaatattaattgctgaacataagcttaaaatgtatacactttgatatcttgtttttatatcatatagaagagctcaacatatttaagtctgttagtaaacatgaaaaaattgttatatgaggaagcacatgtttctagaaagtataaaatttgtattcctaaaatgtttttgacagacagctcaaaattgcttacttcttaagattccactggaagttaaacttactaagggttaaaaattccaattaatatatgaaagctaaaactagaaataataaaggaagtaactccaaatatgagaaaaataagtaatatttttgctaaataaaactatgaggtatgaaagatgtgtttttgttaaggaagaaagagagtaatttttctcctaagtagaatgactagtttttccaaagtagaaaaagtattgaaaacacaactgaatgaataagaaatttgtagacagtttgttgaagatgaatcttgtgaaaggaactctataagggtgatcaagctggctaaaatgagaaaaaatgttatccatatgtttttctaagaattgagtattaatatcaaaagtatactgatataaaactagaatttgatctcctgtgttaaaaccacaaggttttctggaattattgatctgttcttaataggaaatagtaaaaagtttttctttatttttttaggtaacttgcctagaaagcaaagagtctgtactttatcaagatgattctgtgtgctttgtattgtctttattaggtctttgatgactgagaaaactgaatcctctctattaaagagctaagagtttttcctacaactaggtaacttactgtatttgcctttagagtcttttaattattactctggttaaactaatgactataacttcacagtgatctgtgatcctattttgatcaaatgttttaaaccatttgacattttttataaactttccaaaataaactaaattaagtcttcttgaccttgaattaactttgggaaaacctcaaaggacgtgtctctcaccttttaaaagagagatattaaactagttaggcttatttcatatgttaaattatatggggagtgttccaacaattgtatgtaatccctagaaatatatcagtcctaattctggttattgtgctaaaatgttgtatgctacgggacattgaatatataagtttctgataatgttaaggtcataccattggactgggtgagaagttccagaactctggtgaagaaactggaggcttcatgaaactgccaaccaagatcaagcagagcgagatttacttatgtaagactgaaaaactgatgaagaagagttatggttttttatggctttttaatttgaaacattacttgttattttaatgttttattttacagatttaagaaaagcttttttttaaacctatctatagctttcagcaatgtggtaaagtatacttttgtgaacaaaagttaaaacatttactttttcctctctatttgatctttccagaattcagaaactatttgtgaggattcttgtttttatggcaatatggttatttgcataaattcaataagaattactctctttataacatgatacaattggaaatactggttgcattactaaagcattgactgggatgtcatacctgagaatgcacatagaatgactctgtaggtactgtgggtaaagtctgaagtctgccttggtttggtttcctatcttccagaggttttcaaaagtccaatttgagattccttattaaaggttccagcaaaacaaaactcggaaagagcccaagtggtcactactttttctgcatttatgtaaataatcaggccaagttggatgagattaaacttattttgccaacaaattagtctcactccattttttgtaacaatgagggtgactctagagagaaaaattgctttagaagaaaaactgtagtaccactgttactagattgtagcctctttaactattttttgagtttttactatctgcctgtggactggactggatcctgaatttgtctagtttcctccaatatctggctctgaaaacaagacctgctctctttcttaagccctgtaagatgaagctagacaactcaatataaatttcaagaaacaagtctcatgcttgatgtgtgggccatacagagagttcaccaaaatgcccaatattgtaaccagagacattcaaactataaacaaggatgagaacttgatgatttcatgttgtggacagtgacagagcaggagcatcaccatcttggataagcactgtcattttaaagttcaccttgatcaaaaactgcctaaatccaaaggacatcagcctaatggctaaggtcagcctgatcacaaaccacaaataacatctctgaccaaaaacattccaaaccccttcccggcaagagacatgccagccctcatataacctcccctctggccagagagatgttagccccaagataacctcccctctgaccagagacattccaaccctgccataaacttctcccctacacagaaacattccaagcctgtgataaagctctctcaccctaaaactaataaatactcttagtccctaagagagaatgctcctgaccaaaattggccagaagcccctctcaggtttagtctccaaaataaacctttgactgttgagctacttttcgtgtttctttcctctttctttaactcttatatttggtgccaaatctgtaagagagaatgttcctgaccaaaatcagccagaagcccctctccaaaatatttattctccaaaataaaccctgtctttgacagttgagccacttgtcatgtttctttcctctttctttaactcttacagacagcttgtgcccagatgccaaaacaagactctgtatcataatgaaactcttagccctcttaatttttttcttatttatgcctaccattttttgctcagcaggatagacttgtagtaattttataatcagtagcttcttcaagtaacttacaaaattaaatcagattggtcatgtcaaacccagatctttacaaaacctaagggatcctttagtccacccagtgggtaactttggcaatatccctaatgcaattgctgttcaaattgtactagtgttcccttttatagggtaaaacttctagactcacatgtttttactccctgccttgctgacacttcttattgcacatgtataaatatagaaagtattgtagagactccattgcaaaaagttagcaaattggctacttggttaaaatgggtagattccttttctggctcattctttgttctattcaattttagttggtttggttcattaagaccctggctaaggtgcatactccaaactcttggcattcctaatatccttggcattatcgccaaaattcagaaactatttgtgaggataatagcagtctccctggtatactgcattccctcaaaagttttaaatgtttgcatgcagccatctctcaaacttcaaatggtctctattcagctattcagtcggtgtataacactaatcacggtttttgccattaaaagcaatggcaaaaaccacaattattttgcaccaacctaatagaatggcaaaaactcaaagaaatgcatgattatgaggacactataagctatgaatggcatgttgacttcagaaacccagaatggtggtaacttagggctaatgcccctgggggagcatgaccaaaagggggaaattgttaaagaaaatgtataggaagccattggctagcactgagctcctgaactaggcccaacagacccaattaaaatggagtcagtcatgctaaggtgccacatcaccaagccgaaagtaagttgtttatctgaccttccaagaaaccaggagagtgagagataatggccaaatccccaaacaagccagttttagctggcaggattaggaagtcccctctgctttaacctttagaaggaaagtaactttaaaacaaccagtctgctttttgtcatctatttctgctttcctcaactcttttctgtctataaacccatctcctcttgcttagctcatgggaacactgattctactttataaaatgtagtattacctcatcctagcattgcaaacaaaagtcaaatacaatttttaaactgaatttgttataattttgtcttttgacaccaggaaggacccgctccagttctgcctactacttgatcattctcctctttggattaaagctgtgtgaaacacaagaatgatgttgaacacatgacatcaagtggagggcaagccatgctaatttttgtggactggcccattgaagtggtattgagctagaattatagcctgtggccagaggagacctggagctcctttgccttgttattcttcttttcctgggggattagcaacccaagcagacagtttctttccttccaggaaaaccccaaacctcttggtgaagtgacaagaaatattcaccccagcgcacatcttcctaagaaggcccaaggcagaatgctagctctctcagtagttcccaggcaattcaatctgccacaaagtacaatgtagagcactgtgctacagggaaaaacaagcaaacagaaaaggaaaaaagtccattctgcatactgattttgtctaatgtggcatttgcacacttgggcggctacagtacttccgtgctgctgccagattaattcttcccaaacactgctcagatggtatcactcctttggccccaaaccttcactagggttatcgcctaaaaaaggtagcctgggagttaaaagtttgccatggtttggctcaaacttatatttccatgtgtcagtcctattatttcaaattccaaccaacaatcttctataatttttttcgtacttttccatgcctttacacgtgtagagattttttttttttcacttgtaagtcaaaagcctagctaggcatcaaattccaacagctgactttccccctatgcaaacatactctgaccttgccagctgacagaagtatttccctcccctgaactctgctaacactgctttgtcacagcattgcattttctttcttgtctggtccatgtttgttcaatctgctggacctataccagtgcctactgtattatgggtactcaataaatgttcattgaatgaatattaatttttacttattgtggtctttgcattgatggtttctttgtaagccaaatataacatttatactaacttatcatttttgagggtcaaagacaatttccaggtttcaagaaatgagggctctggggtctcttcaacacttgcaggcctagagctggacttgtataccttgagacttccctgctataggcagatgtcattgaataatattagtgtgctctatttacagagtgcctacgcttgtgctaaatcacttcacattcatatccctagttctcctagtgacatactgatgatgcctatctcatttttagaggaaacaaacaatgttcaaagatgaaggtcctttcccagagttgaatgtaaagtgagtaccagcgtcaggattcacacctaggtcagtctggctccaaatctagcttttttcctaccatcccacattccttctttgaattgcttcacagtttctatggaagtttctgctatttctctgtctttgtctctgaggttcatttccactcctgcagcttcacaaaagcccaattacacctgccagtgacctgctttgtctaacaggatttttgatggctatagcgtcatttcagcatccgcacggcctgcttctctctacccagagcacagctcccaggaggtgctggaagcctggcagcgggtcatttcagcagcttgtttttaccacttttcagcacaaactgctttatttcaaacattgctcatcactcacctgcctgcattcccccttcatcttcccttaagtctgtctcataggcctgtaagtagaaattgtggcaactcccgaagtctagcagcactggggaagagtagaaaccttactgtcagacttgctaattgaaaatttggggagaagtccactcagacgtgtctaaagcagattacctttgaagtacttacaaagaaaggttttctgagccttgaggtccataatggggatgtgtatatggagagcgggaaaggagctctttatactcagagagctgaactatttgcaagtgccaaggccttcccttgagtatggttaatgaatcaaatagaaatattatttcaccagttctaacatgcccatttatttttcatcttaacattctgtaatgggaatgtggcttacatagacagtggtagaaccattatttgccaaatagcagtcatcatagttgtttctgccttcacctgagtatcaaatacaccagcaataacatttgcagaataagcaggagcaggggtaggctagctctatgtaattacaaagctcacctaatttagtttttcataggattttagggaatgcttcacatcaaagctgttggtggcacagaggacaatactgtgtggaaaaacttgggcctcaatgaccgagcgaaaattgagtctactcagaagattcagatttggacccagaagaagttttagaaaaatttgaaccaatttacattacttatttttttatgtgtgcccaagaatggcataagattcaaaaaaaaaaatctgtctaaataatatgttagcactctttcactatatatgatataaaaattctagcttatgtaatagttaaattgatgttttcctctgatgtagtttaaaaaaagtttaagcgtacatgggaaataacttatacttttacatcagattggcttgggtttaaatttaggtttcatttcttattagccttgtgatatggtttggctgtgtccccacccaaatctcatttgaattgtagctcccataatccccatgtgtcatgggagggacccagtaggaggtaattgaatcatgggggcagtttttcccgtgctgttctcatggtagttaataaatctcacgagatctgatggttttataaggggcagttcccctgcacatgctttcttgcctgccatcacgtaagacatgcctttgcttctcctttgccttctgccatgattgtgaggcctcctgtggcgtgtggaactgtgagtccatgaaacctcttttgctttataaattacccagtctcatagcagtatgaaaatgggctaataagagtaaactggtaccagtagagtggggtactgctattaagacacctaaaaatgtggaagacactttggagctgggtaacaggcagaggttggaacactttggagggctcagaaaagacaggaagatgtggtaaagtttagagcttcctagagacttgttgaatggttttgaccaaaaagtccaggctgaggtggtctcagatggagatgaagaacttattaggaactggagcaaaggtgagccttgctatgctttagcaaagagactagtggcattttgcccctgtcctagagatctacggaactttgaatttgagagaaaggattagggtacctggtggaagaaatttctaagcagcaaagcattcaagaggtgactttggagctcttaaaagcattcagttttattcattcacaaagatatggtttggaattggaacttacgtttaaaagggaagcaggctattgcttcagagggtgcaatccccaagcctttgtggcttacatgtggtgttgggcctgcaggtgcacagaagtcaagaattgagttttgggaacctccttctaaatttcagaggatttacggaaatacttggatgtccaggcagaggtgtgctgccggggcaaagccctcatggggaacttctgctagggcagtctggaagggaaatgtggggtcagatcccccacacagagtccctactggggcactgacaagtggagctgtgagaagagggccaccctcctccagacctcagagaggtagagccactgacagcttgtaccgtgtgtctggaaaacccacagacattcaacaccagcctgtgaaagcagctgggagcggcactgtatcctgcaaagtcatagggctggagctgcccaaggccatgggagcccacctcttgtatcagtgtgccctagatatgagacatgcagtcaaaggagatcatttttgaactttaaggtttaatgaccgccctattggattttggacttgcatggggcctgtagcccccttgttttggccaatttctccaatttggaacaggtgtatttacccaatgcctgtaccctcattatacctaggaagtaactaacttgctttgattttatgggctcatgggcagaagagacttggcttgtctcagatgagactttggactgtggacttttgagttaatgctaaaatgagttaagactttggggaactgttgggaaggcaaaatggttatgaaatgtgaggacaagagatttggaaggggccaggggtggaatgaaatggtttggctgtgtcctcatcttgaattgtagctcccataatccccatgtgtcaagggagggccctggagggaggtaattgaatcatgagggcaggattttcccatgctgttctcatgatagtgaataagtctcacgagatctgatggttttataaagggcagtttccctgcacatgctctcttgcctgccaccatgtaagatgtgcctttgcacttcgtttgccttctgtcatgattgtgaggcctccccagctatgtggaactgtgagtccattaaacctctttttctttataaattacccacataattcttcatagcagtatgaaatactcaggtatttcttcatagcagtatgaaaatggagtcatacaccctgggaccctgggcatattacaaggtcttaatgagagaataacatttgtagcatgtggctaataattgctatcctgcaagctttattaaatcatttcttttatttgttaaaacgttataaacatttagttttactttagtttttactagaaagttgtaaatacacatttctttttttaaaaaaatctataattttcttttctagttgattttgaagcttcagtatataaagtagcatgtattttacacatgagctttgctgtcacttaactgagtaggaaaaaaccaacagtacaggaagtttgatggagtccaaaatcttagtagagatctgtgggtttccccttaaatattggtgaaaatataggatctgacaaggccctgtcttgtctcttttaagaaggcatagtttgatacaacatcatgccttccaggatttcataactgaattttcatactagaatttttgataggcatatggctgtccagccaaagactacatctcttagcttcctttgcagcttggcgtggccgtgtgactaagttctgatcaatggtatgtgaggaggaatgagctacgcaactttgggtcatgccctgaaaatgaagatgcagtcctcatcccctgtctattgtctgaaatatggatggatggacatagctgaagacattttattgggtcaaagatggaagctgtgtgttaaaggtggcagaagagcaggacaaaaataacatgggccctgatgattttggagccaacatatcaccttggaccaatgactcagacttcaatgtgagagataagcaaatttttatcttgtttaagccactattattttgggcctctctgttacagcactaaaaaatgtacgttaacctctccattttcatgtttctgtccctttcattcactcctccccctgaacaacacgacttaaagtcactcatgtgtgccaatctcataaaaaggcttcttctgagttcctattctgagaacctgctaaatttccttgaaatctagttgccttgaagttgctagtcctcctccctggtgaatggtgtcttgccctaaagctaagccccaatacccatggaaatgttttctcaaaatctggttcctgttcattctgactgcctggatgttccattatgtttcctacctcctcttaagatcctcagcttccttaagttggacccaatactaattataaccttatattggcttttcctttccttgcctatgtgatcttttttgttcatcacattccaccagcaaagtccagaggcagcattttgaatagacctggtcccttttctcaatctctttcagtttttttttggccccagaaaatataactgatcccttgtctccatctctttggcctttgagctgaaataactagaagaagcttgccaaagcatactaatatatgtaagttgttgagtgactactgtgtaagtgtcccattttagggattacctccaatccttataacaaatctaaaaagaggttgtattattccccttatacagatgaagaaactgaggctcagagtgaataagtgtcttgtccaagatgcctcatctagtaagtaatgaatcttcaattaaaacccaatctataatcttttcactatataggctatcttctaagcccaatgttaagacaagggcacagagattagggctcatgaaaaagaagacattctctttgtgagaatgtcctaccatgggtacacagattccaaggatgtgaggggactatctagcaccatactctagaggccatattaacaccaggatgctaatatgaaagtttcaaagcttcttggatgaaaagatgctctccttctaacttctgctttttgaatttaaaaaaagtcatttttctcaccttttctctcctaggattcttctgtttccctgaccttgattgacatttctccctaagtcctctgaattattatggaattaaatggcttattttaatttccctaggtgtctttattgaattctttcacagtgttttatggaaaatatctgattacgaattcatagaacagaacattatgagattctttgctaagtggctgccacagtagtattcaggtcctgaagcctctgcaatctctgtttctgtatacaggctcagaaacaaggaggcaagctaagttccagcatcttgcagttgactcttttatatcacctcctgaacaattcctaaacagaaaatactgtccccaaccccctggaaagattcatgaaatattagaaagcaaatcattttaacacagaagttaagatcttgggttctggaatcaaactgggtttgaatctcactgcttctgtttaaatgaccttgggtaagtttcttaatctcactttccctccatttcatggtctgtaaagtgggagtaacacctacctcacagagtattcatgaggattacatgaactaatagtgccaagctcataataagtgccaacctaaaagttaactaactatatcttttataattaagaagtaggagagtcttgttaaacctagtacaaaataccatagcatgtgaaagattctatgagtacctgcacctcctaaccattttctgacctatatacgtattatacataaacatgaaatcatatgaaaccatgctatttagcagaattcctctaattcagcttgattgacacaaataatccacaatgtggaggtgtcctgagagatcagatgattccttcagagaagagggtgaattctcattagagatctggtagttccagtctagatgagtcaccaatgaatagatttgctatgggttaatgttccgcccagcttgactaaattttaggcaggtttcttcctgactattggctcctaacctcccttttcttagagcatttactttacaaaacttgcaattataaattaggtctctggccctttgacatgtaaatcttctcccagtctctcactgattttacatcctaaaaatgccctttccaaggacctagaaaccatccttttgaaatatgattatcaaaaaagataatgtccttatcttctcatctctgtggaaggataggaggctgatttgataagcaccgacaaagaaacaagattttccttcaaagtaaggaagtatgaagaagtggccttgtagggagtgacagacatggctcagattcaagcagatcatttagtcattatagagaagttaaatattcctctcttacaggttagctgggctttaaaatcacaagaaaaaagtcaaaggttacaggcttttgtgaaaaagtacacaaaaagatgcctttcacaatgacagtcaactcaactctccaagcaatgcctagtttctagaaacttccagatgaagaccagccatttcagtctctgaagtcccaggggtgtgctgggatcttccacccactcagaaagcctctttctaagaattcagtctttgagcatagctgttagctagaaagaaaattccagttgatgtatgaatctatagaaccagtcattctcatgccctctagggataaactaggcatctccaaaccctgaaggaacagagtggtggtgagtggtgttcaaatattttaaaagtattggagtaccaacaaggacatactggttaggagaatatgagctcccaaaatggatattagacacattattattactttttgagatggaatcttgctctgtcgcccaggttggagtgcagtggcacgatcttggctcaccacaacctccacctcccaggttcaatcgattctcctgcctcagcctccagagtagctgagattaaaggtgcatgccaccacacccagctaatttttgtattttgagtagagacagggtttcatcatgttggccaggctggtcttgaactcctgacctcataatccacctgccttggcctcccaaagtgctgggattacaggtgtaagccaccatgcctggcctagacacattataaaggtaaataattataaccatgtgatgttgacacatgagtaaatatgaataaattcagatacctaaagggaatgcagtagaaattaagtaaaaaacaaaatataatttggcatcaagcatacaataaaagtagcatttcttttttttttttttttttttgagatggagtcttgctctgttgcccaggctggagtccagtggcgtcggctcactgcaaactccgcctcccaggttcacaccattctcctgcctcagcctcccaagcagctgggactacaggcacccaccaccacccccggctaatttttttgtatttttagtagagacggggtttcaccatgttagccaggatggtctggatctcctgaccttgtgatccgcctgccttggcctcccaaagtgctgggattacaggtgtgagccactgcgcccggcctaaaagcagcatttctaatcagtgaggatgacaaggactattaattcattcaataatacaggaacaattaaatagtcatctagtaaaaataaagtttgattcatacctcattccttatacaacagtaaattacatagatcaaatatagaaaaacccaaaccataaaagtactagaagaaattataataagattcttatataatctggaagtgagggaggcctttttaataataatacaacattttgaaaccattcatttaaaaaaggcttgattaaataaactacaaagtaattttaaaaatttgcatggtggccgggtgcggtggctcacgcctttaatcccagcaccttgggaggctgaggtgggcagatcacgaggtcaggagatcgagaccatcctggctaacatggtaaaaccctgtctctactaaaaatacaaaaaaattggccaggcatggtggcgggcacctgtagtcccagctactcgggaggctgaggcaggagaatggcgtgaacccgggaggtggagcttgcagtgagccaagatcatgctactgcactccagtctgggtgacagaggaagactccatctcaaaataaaataaaataaaataaaatttgcatggtaaaaatcagtgtaagttaagttgcaagtaaatgaaaaactgaggaaagataattacaacttgtatccattcatggggctatatggctaataagaaagagctcctttgcccttcacatcaatagaaatagaccaacagcagctcccagaatgggccaaggcattttgaacaggcagttcagagaaaaggaaatacaaatggaacttaaacatatgaaaaaaagctcaattttattcataatacaagaaacagcacaaagatactacttttcacctaccaaatatgtaagttccaaaaatttgataatatgctatattggtcaggacataacaaacttttccttatattgctgctgatggtataaatcattgtaactgctaaggagggcaatttggcaatacttatcaaaagtacaaacatccctgaaccagcaatttaacttttgggaatgtatccatcacacatatgccttcatatgtgatgtataaataaggttattcattgcagcattgtttataataagaaaatatataaaccattgttattgatagggagatagttaaataaattaaggtatattaataggattattattattttttaaaattttgcaggcacataaaacattcacacaactaaataccagaaagtgctctatgttctactgtggaaatatctctattaaattaaattaatgggttaaaaaaacaagataaagaacagaatgtagagtatgctaccattttttatatagcttaaaaatgagagataaagagaggaaaaatatatttttatatttgcttgtacctcggttaaatatccctggaaggatatacctgacactgtgtggttgcctattgggaagagaaatgggtatctgaggtaataggtattatagggagatttgcttcactaaacattgtataaacttttatactttcttacattaaaactctcttggccaggagtggtggctcatgcctgtaatgccagcaccttgggaagccaaggcaggtggatctccttgagttcaaaagttcaagaccagcctggataatacggcaaaaccccatctctaccaaaaatacaaaaaattagctgggtgtggtggcccatgcctgtgatcccagttacttgggaggctgagataggaggatcctttgagctggggaggtggaggttgcagtgagccatgattgtgccactgcactccagccagcatgacagagcgagaccctgtctcaaaaacaaacaaacaaacaaacaaaactctcttatatgacatctcatactttgaaatgttcaatttaatcattttccaaatctggaatatggctcatttttattgagatatgaattgttgttgatctcatgcttgatcttcccaaacagaacagaggctctatatctttctctgagaaactttggtgatatttttagcactgaaagtgggtaagaacacttctaacactggaaattcaaagtctgcagcacttactcttgggacttggaaaaattcttttttaaattaataattgttcatcaatggttccattttctttgcctacaagcatgtttcttccttcaaagtggacatgggtgtgtgcatatactcatctgtacacacatacatacacatgtatatgtgtaaggtattgaaagtaaaatgttttcttttaaagtatgtttgcatttttcctagaattggcctcacagtttccatcagacactcaaagcagtgggtgacataggaaaggttaaatattactaaatagtggacattacaattcctagttattcttttcccctttcctacagctaccatttaaatctaggttggcaacttcccttgggtctaaatcagcagtccccagtctttttggcatcagggaccggtgttatggaagacaatttttccatgggcagggcccagggtggaggatagttttgggatgattcaagcacattacattttttgtgcactttatttctattattattacattgtaacatataatgaaataattatacaactcactacaacgtagaatcagtgggagccctgaacttgttttcctgcaactagatggtcccatctgggggtaatgggagacagtgacagatcatcaggcattagattctcataaggagcacacagtctatgcagttcacaaaaaggttcgcactcctatgagaatctaatgctgctgctgatgtgacaggatgcagatctccggtggtaatgctcgctcacctgctgctcacttcctgctatgcagccaggtttctaacaggccatgggctggttggtactggtctgtggtctgggggttggaaatctttggtctagatgaccttgacagcagtatagctggcctgtctgccttcaggctttccacactccacattatatgcccaaccagccagctgttagtaatcattttaaaaataatttactgcctactttatcaaactagctgtgaagcgtttgactgtacgttgaactatagccaagtgtgctgtatttctgcactcatgagtgagcacttcgttgtcatacttcattgtcctggaatttctctgttcctgtttttattagtggggaaaactctgctgtattaattttgttcacagaataaacaaatttttctttaatatataaaaataaactagaaaacatgttttactggtcacttttcaggaagaaatgcctgtatatattttttaaatttttttttttaggaactttccatagggtgaatgatccatgtttgaatataaagtaatgattttattcagtgcttataaactgtattcaattgcatggagaaaaaagaatacactgacctctaatttaaaagtaaagagctttctggagaggtaacagaataataactaatggagctttacagtttataagtgctttcatataaatgacctcatttgtccccaccaaaatctcatgacaaattgtaatccccagtgttggaggtagggtcgactgggaggtgactggatcatggggggtggtccttcatgaatggtatagcaccatctcctggtgctgttcttacgatagtgagtgagttctctcgtgagatctggttgtttaaaagtatgcagcacctcccccttctctctctcttggtcctggtcctgccatgtaagatgcctatgcttctgctttgccttccgtcatgagtaaaaactccctgaagcctccccagaagcagatgccgctatacttcctataaagcctggagaatcatgagccaattaaacctattttctgaaaaaattacgcagtctcaggtatttctttatagcagtgagagaacagactaatacatcatcactgttattttaaagaataaggaaatgaagactcagaaggatgaagcaatgaccaacccaggtcatacagtaggtaagcgaaaaaccagggcctttaacttaaactttctgacactgtatctcataatctttctcatatggtgagtggctctcccaacattactgttacataaaaatttaggtcatgcgtgtaattttatcaagtatccctcaattcctgggacttaagtaattgatacacagaacaggttaaatagagagccttttctgaaagggtaaggaaaaacaacattgatgtttcagaaccaatgtgtgtttatatcatggaaaaagctagaaatcccagtagaaaagtctttacagaagcactacttatcactgtatacctggctatatataaatcataggtagcatactccccctttccctgaattctaatgaaagcattgttccaaatctattacagctatatagtttttataaaatgacccatggggaaaattctttctagagtttaaaagctggaaaagagtttctttctctacacgccttgataatattgttatcaatataatattatataatattataatgacagttctatagcccacttttgtcttgattatcaagaagctcagagtcaagttgtagtcttagttgtagtcatttttcttaatttgggttttctaaaatgtgattgttaatactgaatgtcaatttgattggactgaaggatgcaaagtattgtttctgggtgtctccgtgagggtgttgccaaaggagagtaacatttgagtcagtggactgggagaggcagatcaccctcaatctgggtgggcacgatctaatcagctgccagcgtggctacaaaaaagcaggcagaataaagtggaatgggcagacttgctgagtcttccggccttcatctgtctcctgtgctgaatgcttcctgccctgaaacaacagactccaggttcttcagctttggactcttggagttacaccagtgatttgctaggggctcttgggccttcggccacagactgaaggctgcactgtcggcttccgtacttctgagattttgggacttggactggcttcctcgcttctcagcttgcagacagcatattgtgggacttcaccttgtgatcatgtgagtcaatattccttaataaactccccatccatcctattagttctgtccctctagagaaccctaatacatggattattttctttgttctcctttttacatttttccttttatactatctagttcataccttttactaccgtttcaatggatttttattttactgtaattatatctttttttataagcctcctcaaatctgttttgaagataggcagagtataaacatacagagtccattctaaggaacatgagcatttagtccattgaaagaactaacaatagtataccaggtgcaaatgatctatttaatctcttgagtagcttccagagaagaaatttctgctgtaagtgcacagggtaatagagtcctgttttctttcttttattcttataataaaagtttgacatcactatcacaaccatttcatgtgtcagtaacagtagatgataggtatttggtattatacaacatttgcttgtgttaaaatgagccctggtatttcacgtatgttttatgattgtgcacatttggtgtgatccaaagagataatagtggaattttctatggaaattcttgtttgatacagaattatatcagaagttgacacaagaatcaatgtgtatattgtctagggtatatatcttacatatataattatatcacatctacagttctgattatcataggaatataatacacatgtcacacggacaaacgtattcattttcctaattgatggctacagcagagaaaaccagtgagtatcatctttgagagataaaaccgtggaaatgtcctttgtggtatgattaatactaaaagggaaagggtaattgggtgagaagttagaaggtgaaccaaaggaagactaagaactttttgtaccgtcaataaaacaaatccagacttagacacggtgagacgtaaaaaaactacatcaacctggagaatgttcctcccttaggattttcaagccactcaaaaatcaatcaaaaaggtttttcttttatagggacggctaaacagaactagcagaaacttagaggtaaaattgagtgacagggcggagctaagcagacatcatgatggggatgatataacaggaaatgttgctgtgatcagctaatttggaatgaactgttaaggtagggtgatatagctagtgtttttgttccctagtgtattgttcagtttcacattgaattgtaatcctcagtgttggaggtggggcctggtgggaggttactggatcatgggagtggatttctcatgaatggtttaccatcatccccttggtgctattctcatgacagtgagtgagttctcacaaaatctagttgcttaaaagtgtttggtacctcccccctctctcgcttgctcctacatttgctatacaaagtgcctgctcccgctttgacaccctctaccatgattgtaagctttctgaggcttccctagaacgcgagcagatgccaggaacatgcttcctgtaaagcctgcagaaccgtgagccaattaaacctcttttctttataaatcactcagtctcaggtatttctttatagtaaggcaagaacagcctaacacagtgggatgtttacattttagtgtttgctcagatttggggcaagccaaaagtcaggagcctgtggggaggagagatgtctgattaaatcttgatcaagccaagtcagtgggcaagaaatgggcaattgtgagcatctggccgggatctgcaacctcatgaaaagtatataccatcaaaaggctaactacttgtttgtcacataaattcttataaaaagcttagtggagccaagaagcaagctaagtataataagagaaactcttcttaccatttgtatcactaatgagcacataattgcagctagtcatgtaagtctcctacaaatcagcgtaaggttaattaagagagttgagacacttaggtgaaagtcacttttgcttatagtaaagaacttatctatcttacagacacatatcacttacattatgtatttgttatattaatatatttaatatatttaaaaaacattgtaaaatgatgatctggcaatatccctagaagaacctcattgaaatacttgagatttattggtcatttgtctttacaaaattgagatttgaaaagctttaaaggaggacattctaccaaagcataactcataaaacagaagataaaagtatgagccatggaattatagagctggaaaagatctagccctactgtttcattttcaaatgaggaaattgagggttattctaaggggttgtttttttaagtcatacagtaagttggtgcagacggaggagtagcaatcagatctctgagctcttttcctctttgacaatgaagttcacgaatgcaattttgtttcataagttatttactttactaaagtaaagtaaggtacagctatgatttattgttaaatgagaagaatgagtgtcagagaactgtatatggcatgatttcatgttcttaaaatacaaacaatatttgtcaatctatctatctatctatattgatttatttatcttctatctgtatgtgattgaatgaaattggagaaatgagtggaagcatatacaccacactaacattgaacatttacaagaagggtaaaaaaaggagtaagaaaaaaggaagcaaaatagaatttggtaaaatggtatgtgaaagtgaagattgcaaaacttttatccataaaattattaatacataaaaattgaatgtgcacatagacgaagactagaaagtcactaggatatacatacaacaagaacataaacaaaagaacatattattttgaccaggggtttattaaaaataaaaataaaaacaagtccaatgactcccttttctgaaaccactgaaacacaactattttgactcaaaactgataaaaagatgtaatcatatattcacaaacagtattcacttaggaaattttaccttattttcagcattgatacctataaagttttgtgcttcacctatgaatgtatatatatgtacatatacgtccatataaatattttatttgcttaccattatatttgtttactaaatttggatatacttctttattaaataatttagacaatgaaaataaaattaatgtatactcactgttaaaagcttagaaaatttagaaaaagagagagcagaaaataaaaaccactgataatcttactcagagatatccactgttagactttttgcatatgtcctttcagattttttttgcatgtatgtgtattcaaaaatgggctaatatcttactttattatctgctgctttcatttagtaacaaattatggctatatttctgtggtaatatatatagatacaatgtcattttaaattaggtgtttaacattttatcatcaggaattagtgtaatttcttttttaaattttctattaatggtcatttgatttgattctattttttaaacaaccataaacaatgctgaaatgaatatctttatatgtgcattttttgctcctgttcaattgcttccttaggatatattcctatatgtgatatttaattataaaatatttaatttcctaactccctggaagtttacacttcagtatcaaaaacactagtggatgacaattcctttgctattagaacagaagaccatagaatcaaccaataacagatacaaagtttttctcatgggtaagtgccctacactggtcacttaattcttcattatattttgggcaaataaatttgtatctaaaaaccatctttatgatgatctatgacttataaaaatctactatttatcttacaaattacttccaattacttttacttcttcttctgttgccggtatgaggtcactaatggtagattttagaaaatgcgctaacaattatatgtaaaccatacaattagtattttttaagtgtctacaaagaagacatttgcaagtggtttctagctttattgtgaatgtgcaaggggtatattctatcaagtaagcatcattcctatcctcaagacacttatatatactggaaatatgaaatcattatccatagtttggaaaaatttttcttttaagaaaataatagatggaaaagaaaagagaagtccaaggaaaaaaaaagtcatctgttaagatctgctatgtaccaggaatatagttaactacttccttattaattacagcctcccaataatattgaagtagatattatttattatagctgttttccatatgaagaagtgaaattcagactgatgaaatgatttgcacaaggtgacactgccaataattgatatagtgagattcaaacctaggtgacatacttttgacccaacaaaataagttttcaacaacttgagtgtctcagtgatagaatatattatctctggaagcagtgagcttatcatcatgggaagtatgttagcagatgttagttgatgttggttgatcatatatcagagacatgaaaaatattctactactaatgggcgatttcacttgctcatctccctaggccccttctggagggttagatattttgttgaattgaaaactgtaccatttttaaaccattgatacgtcataagcaaatattagaccacagaataatactcaactattttacacttaagggaaaccaaatatcacaatgaatattatctctaattttagaatactagagaatctcagcggtatttgaaagatcaaaatttatattatgcatgttatttttgcttttaaacactagttagaatgtatggtgctaaatacattttagcgtctgtggtgctaagaacacaatcgtttgattaaacaagatctcttgataaagattagttagcacatgctagcctaacaattactgaaattcacatttttacatgggtatcctattattaagtgattccttagatttaatctatctgaaaaaagtcagtaaaatgttatataaaataataataaaaataaatcctctcttgatttagataaaatagcatgcttgtgtgctaatgtattctactacctaccttccccagttgcttctattaaaaatagtactgtaaaaagaaataaaaatcaaaaatataatatgcctgttgcaaagcgtttcagagaagcttttatgtgaaatttaacagttcatggaacaaagaatatgactggaggcaaggaaaatttctcctctgaaaataagtgaaacctaggtcgtcattagagtttgtgcattcacttttgggacataggatatgttcagggctatgactcatttacatacatgactatgtggcctgtgttttgggagggctgtggggtgttagctgaagccttccatgctggtagttatgctttgctaagagaaggctggttctctacttacaccccctcagatggctctctttagtgcatgtctgtatgatttgacctaacagaaagaagaaatggactagcttctgttattctatgtcagcagcatattttattgaaaggagtatggacttcaggaaaagaaaaatcagggtttgaagcagctgagaagtcaacaagctacttattcttctgagctcttcttcatctataaaatgggcataataatacttcactgagtgagttgttttgagaattgaatacaaaaaatgttgacagtagtaaactgcacatcatctgatacacagttaagaatggagtacattttagcatccttttttttagttctgtaataaggagattgtaaatacatttaaaaaaaaatgtttccctagagtttggtgggtgatattgccacttaggaggatagctatcagctgcactggtgacaaagtacctcctgatgcagacccagagctacataagcaaacatgaggggcttggaagcaacccagacatcaagcaggagcagtttccagggctgtgaagatgtttgctctcctctacttagaaagaggctcttttaggagaaagggacatatttaggagaaagagctctgcctgttcttgcagacccagggaaagaggagcttggatcaggaagccagagagcatttactctgccttagtgagttcctaaggtcctagaaactctctatgggtgggtctctgctgcggtgagggactctgaactgtgacctgcccctcagatcccaggaagaagagaagcaaaagcttagaaagcaaggctgtaggataagtgttagccactgatttcagagctatgtattttccagcaaattgtctaagaactatgctttatctatccaatatagacaatgtactctataataaaattccttaggaattaattttaatagctttcatttataattaaaatctagatggcatttatatattgacaaatgaatacaatttaaccttaagtataagaagaaaatgccagccttaaaaatacattttaactacttaactatttttatacgaatgcacttgagattaatctaatatagtccatatatcttgcagtcagttcaatgtaacaagattattaaaactggtttagaaataggagggtgtttatgagattatctgtcacccttgtattgtgaagcctgagcgcttgattactctgcatgtttgctcttgtgtaatgacaagcacgtcccgtggagccaattactgcctccactttacttaagtgatcctccatcccatcaagaagatattcaacctgattcttagaaaagtgtgagtatttgaagtagttccagtgaaggtggtaaatttcctaacttgaaagcactttcttatgattgcaatgacaatggttaaagaaataaaacttcagaaaagattccacatgaaagcaacttagaatatgagtaattataccttaactacaatcctcagtgatcaaaagataagcaaggtttcccaagcatctttctgtggagcatgcactctaatgagaaagagaagccatgcatactctgataaaaaggcaagaaaattatatttatgaattaccagctatgtttcaggctataaagttgagaattcccaacctgaaaatctgaaatccgaaatgctcccaaatctaattttttgaacacctacatgacaccacaagtagaaaattttgactgtattttgacaagccacagtcaaaatacagtcaaaattttgttttgtgcacaaaattattaaaaatattgtataaaattacattcatgctttgtatagaaggtgtatataaataacaaatgaatttcatgtttagatttgggtcccaactacaagatgtttcattatatatatgcaaacattccaaatccaaaaataattgaaatctgaaacacttccggtcacaagcatttcagataagggatacctaaactgtagtagtacagtgtataatttaatcttgctacagtcttatagggtggttattaaaaatctgagtttctaggtgaggaagttgacatcagggaggtcagaaattgcaaaactgggacttgagaccaggtccatctaacttcaaaacctgttatctgaaaggattctaaaaatgcaaacctgagagtgcatgatgatgtagaatatattatcacatcacatatccagctttgctgaagaacagggtgttctgcacaatatgaggcattgaatataattgaatcctacaccaatactgatttgtttggcatttgagtctgatttcaagtgggaaaacagaagtgttgtttgtaaaacttatgaattaataagttctgagaatcaaaaggactgacctcaaacaaattcaggaaattatatttactcttatttctgtcttagtcctggacagttgacgttgctagataagtttcaaactactacacaattgctgagaaaattggggtggtaggaaaaagaggaaactgatttctattagtaaaactagttgatgacccatagagactgctcaaactttgagtgggttcatatttataggaataaagatgagagacctccaaatcttttcctgatccaataaatattttgtttataaaatatctgacattagaaatgtgtaggggtggggacaacaaaaaaaatgctgagacaaaataggcaagagaatccaaatgtaatgttgacctttgatccttcatctccattgcttaagattttattctcccaattgtcttaagaggtcttaagcaacaaacataagtgttcaaaaaactacagagctctgttagagctaggcatagcacttgacttagtatcctcccaaagcaaaattttgcagatagacaacacatactacataaaacggtgtttcctcttgctcattttaaatttacctcccattaatttcattgcctgtcccttcccaattgtcaagcaaaagcagtatgatcagatttcatcaaaataacttagaccacttaaatcaatgtgtattagacttttcttctttctgtgccagggtactctggaattttatgctctcttttagtaactgctcttctctggtaccaattgactggtgcatttatcatgacctgtattccaactgacacaccacaacaattcctgggaatacagtgaatttaacattaagattgtaagatcagctgacattctaagattcttacagacagggcttacgtgtatttattttggtatgaccacagcagcaaacacaatgtctgcatcacaataggacaaggtgagagctaaaatttaatatgtatctgcatatgttagacttttatgtatatgccatcgtgcatctctacactcatcctctattagtattctcatttctgtcaatggggaaactgagtaagtcacctaagatcaagcagctggtaaataacagagccaagatttgaattcatgtctgtctgactttttttttttttaccatgtgatttaccaaccacactcagtacccaaaatattacttgtggaatgccattttcacagggttgtttatcacacctctaattaaacctacccttgagagggaaaaaactgcaactcagcaaaactgtaattcacaactagcctaatggccaagtggaatggtacatgccatggtcaatcacttagcacgtaagtagtgtgtgatgaagaggtaaaaattgaggcacacacagagccagcctctgttaataacaatgattctttggggactgagtctccactttcattttaactaccactgtagaaaaatgataaataaagtcagtaggtaggatggcaatatgataggtagaaagagaagaaaaaataatttgtgtatttgtttaccactaaaatgcccttaagaggcagctttgtccaagtggcacttttaacatttatttttacttttaataatcatgtgtattatatttttatggctcaatggcactatatgtttgaagaattttagaacattaatatccaatgttacctaagtctagctgtggacttcatgcatgaaacaccattccagcacagaagcactcctagcttgaatatcctcagtattgaggaacttactatcacacggggcagccactctatctttgaataaagatagaatgagtaaagttgataagaaaagaaattcttaccttcacatcaatcaaagatctgtattcttacaatatccctgaaattattctgtaagcaggcctgaaagaattacgtggcaacatatgttgctaggctggttcgttgggttttggcaaagtcctcagtgtttgtcagcatttctatgtgagagaactggctacatagtctatcttggagctaatatcatacttgggtcactaaacatatgtatgaaattttgagaattgtttcttaatttttcagttttaaaatctaatgcaaacctgtatttcagaaaaaaagtattgcttgacctttttaaaaattatcacttaattaacatggggcccagccgagttagaataacttctcacttgttccaacataagagaaacaagcaaggtactcctaccagggtgtcacttagacctgcatattctttttagtgattgcaatgttacttcttagccacccaggccaatccaccataaaacaatcattctccaactttcctggtcttaagagtcacttggattgcttgtttaaaaggcatatttgttgagctctgcctccagaaatactgatttagtagcatggagccgaggaatcttcatttttcaccagcgctggaagtgattctgatgcaagtgatttgtagaccacattttgagaaaaattccctaatgttagcagttgtaatgatgcaggtagttcattcagttttgcttcagtacaaaactgcaaggataatactattgggttttctagatataggatcatgccatctgcaaacagggatagtttgacttcctctcttcctatttggatgctgtttttcacactgctgtaaagatactacctgagactgggttatttataaagaaaagaggtttaactgactcgcagtttcgcatggctgaggaggcctcaggaaacttacaatcatggtggaaggcaaaggggaagcaaggcacatcttacatggcagcaggagagagacacagtaaagggggaattgccacactctaagaccatcaggtctcgtgagaactcacccactatcatgaaaacagcatgctgggaaccaaccccatgatccaatcacctcccactaggtccctcccttgacatatcaggattacaattcaagatgagatttgggtgggaacacagccaaaccatagcagatgccctttctttctttctcttgcctgactgcactggccagaacttctgatactatgttgaataggaataaggagggcatgcttgtcttgtgctgattttcaaggagaatgcttccagctttgaccattaaaaagaatgagattatatcctttgcagggacatggatggagctggagaccattatccttagcaaactaacacaggaacagaaaaccaaattctgcatgttctcacttataagtgggagctaaatgacgagaacacatggacacacagaggggaacaacacacgctgatatcttttggaggatggagggtgggaggagggagagagtcaggaaaaataatgggtactaggcttaatacctgggtgatgaaataatctggacaacaaacctccatgatacaagtttacctatgcagcaaacatacttgtatccctgaacataaaataaaagttaaaaaagaagaaaattgcaaggatggtaagatttggggctctttcataacttttcaaatatgtcaactgagaatatcaaaatgaatcaccagccttttttgtttggggtgtgttcctgtgtgtttgtcacaaaattcacatacttttcaactgtgcctgccttacactaaaatagtcattatacccagctgtataggcccagctatatacatatatatgtatatatatgtgtgtgtatgtgtttgtgtgtgtctgggggctccacacacatttggtgtcaatactgaagtaatgcaaatatctctgtattggctacaaaactcaaacaagaaaaatgaatagatttggatctgatatggccttccactttggctctgaactttagttgtaaggaagaaaataatacttagtaagagtaatatataaaatagtgattgtaaaaccaactatttgtgaaatagtctgccaagtattatgggatacataaagatgattaacacacagttcttgcaaaattggagcccacaacttagcagaagttgttaatcactttggtcaggtgaatgtttcactgaataagaaatattagtgtattaagtcatcagattctttaatgctttgaagtgcttcatactgagctctacataaaatagaaacttcgtgtgtgtgcatgtgtgtctatatatatacatatttgaagacagggtctcactatcttgccaaggctggtctcaaacacctaggctctagcaatcctttggcctcagcctcccgagtacctgggactacaggcacatgcctagcacatagaaaaacttcactggtgtccaaggtggctgaataggaagagctctggtctgcagttcccagtgagatcgatgcagaagatgggtgatttctgcatttccaactgaggtacctggttcatctcattgagactggttggacagtgggtgcagcccacagagggcgagctgaagcagggcggggtgttgcctcacccaggaagtgcaaggggttgggggatttccccttcctagccaagggaaactgtgacagactgtacctggagaaatggtacactcctgatcaaatactgcacttttcccacagtcttagcaactggcagaccaggagataccttcccttgcctggcttggtgggtcccacacccacggatccttgctcactgctagtgcagcagtctgagatcaacatgcaatgctgcagcttgacggggggaggggcatccgtcactgttgaggcttgagtagctcacagtgtgaacaaagcagccgggaagctccaaatgggtggagcccactgcagcttagcaaggcctactgcctctctagattccacctctgggggaagggcatagcagaacaaaaggcagcagacagtttctgcagatttaaatgtccctgtctgacagctcggaagaaagcagtggttctctcagcacagcgtttgagctccaagaacagacagactgcctcctcaagcaggtccctgacccctgtgtagcctgactgggagacatctcccagtaggggccaacagacacctcaaagaggtgggtgctcctctgggacaaagcttccagaggaaggatcaggcagcaatatttgctgttctgcagcctctactagtgatacccaggcaaacagggtctggagtgggcctccagcaaactccagcagacctgcagctgaggggcttgactgttagaaggaaaactaataaacagaaaggaatagcatctacagcaacgaaaaggacatccacaccaaaaccccatctgtataggtcaccaacatcaaagaccaaaggtagataaaaccaaaaaaatgggagaaaccactgcagaaaagctgaaaattccaaaaaccagaatgcctcttctcctccaaaggattgcagctcctcgccagcaagtgaacaaaactagacagagaatgagtttgatgagttgacagaagtagccttcagaaggttggaataacaaactcctctgagctaaaggatcatattctaacccatctcaaggaagctaaaaaccctgaaaaaaggttagacaaatggctaactagaataaacggtgtaaagaagactttaaatgacctgatggaactgaaaaccaaagcacaagaacctcatgatgcatgcacaagcatcaatagctgatttgatcaagtggaagaaaggataacagtgatggaagatcaaataaatgaaataaagcaagaagacaagattagagaaaaaagagtgaaaagaaatgaacaaagcctccaagaaatatgggactatgtgaaaagaccaaatatacatttgattggtgtaccagaaagtgacagggagaatgaaccaagttagaaaacactcttcaggatattatctaggagaacttcccgaatctagcaaggcaggccaacattcaaattcaggaaatacagagaacaccacaaagatactcctcaagaagagcaaccccaagacacataatcatcagattcaacaaggttgaaatgaaggaaaaaatgttaagggcagccagagagaaaggttgggttacccacaaagggaagcccattagactaacagtggatctcttggcagaaacattacaagcaagaagagagtgggggccgatattcaacattcttaaagaaaagaattttcaacccagaatctcatatccagccaaattatgcttcataaatgaaggagaaataaaatcctttacagacaagcaaatgctgagagattttgtcaccaccaggcctaccttacaagagctcctgaagaaagcactaaacatggaaaggaacaaccggtaccagccactgcaaaaacatgccaaattgtaaagaccatcaacgctatgaggaaactgtggaattaacaggcaaaataaccagctaacataatgatagggtcaaattcaaagataacaatattaaccttaaatgtaaataggctaaatgtccctattaaaagacacagactggaaaattggataaagagccaagacccatcagtgtgctgtattcaggagacacatctcacatgcagagacacacataggctcaaaataaagggatggaggaagatctaccaagcaaatggaaaacaaaaaaaagcacggattgcaatcctagtctctgataaaacagattttaaaccaacaagatcaaaagagacaaagaaggccactatataatggtaaacggatcaattcaacaagaagagctaactatcctaaatatataggcacccaatacaggagtaaccagaatcataaagcaagtccttagagaccgacaaagagacatagactcccatacaataataatgatagactttaacaccccactgccaatattagacagatcaataagagagaaagttaacaaggatatccaggacttgaactcagctctggaccaagcggacataatagacatctacagaactgcataccccaaatcttctcagcaccacatcccacttattctaaaattgaccacatagttagaagtaaaacactcctcagcaaatgtaaaagagcagaaatcataacaaaccgtctctaaaaccacagtgcaatcaaattagaactcaggattaagaaattcactcaaaactgctcaactacgtggaaactgaacaacctgctcctgagtgactactgggtaaataacaaaatgaaggcagaaataaagatgttctttgaaaccaatgagaacaaagacacattgtaccagaatctctgggatacatttaaagcagcgtgtagagggaaacttatagcactaaatgcccacaagagaaagcaggaaagatctaaaattgacacgctaacatcacaattaaaagaactagagaaacaagagcaaacaaattcaaaagctagcagaagacaagaaataattaagatcagagcagaattgaaggagatagagacacaaaaaatccttcacaaaatcaatgaatccaggagctggttttttgaaaagatcaacaaaattgatataccactagcaagactaataaagaagaaaagagagaagaatcaaacagatgcaataaaaaatgataaaggggatatcaccaccaatcccacagaaatacaaactaccatcagagaatactataaacacctctacgcaaatgaagtagaaaatctagaagaaatgggtaaattcctggacacatacaccttcccaagactaaaccaggaagaagttgaatctctgaatagaccaataacaggttctgaaattgaggcaataataaatagcctaccaactaaaaaaagtccaggacaagacaaattcacagccgagttctaccagaggtacaaagaggaactggtaccattccttctgaaacttttccaatcaatagaaaaagagggaatcctccctaactcattttatgaggccagcatcatcttgataccaaagcctggcagagacacaacaacaaaagagaattttatgccaatatccctgatgaacattgatgtgaaaatcctcagtaaaatactagcaaactgaatccagcagcacatcaagaagcttatccaccacgatcagattggcttcatccctgggaggccaggttggttcaacatacacaaatcaataaatgtaatccatcacataaacagaaccaacaacaaaaaggacatgattatctcagtagatgcagaaaaggcctttgacaaaattcaacagcccttcatgctaaaaactctcaataaactaggtattgatggaatgtatctcaaaataataagagctatttatgacaaacccacagccaatatcatactgaacgggcaaaaactggaagcattccctttgaaaaccggcgaaagacagggatgccctctctcaccactcctattcaaaatagtgttggaagttctggccagagcaatcaggcaagagaatgacataaatcaattagaaaaagaggaagtcaaattgtctctgtttgcagatgatatgattgtatatttagaaaacccaatcattttagcccaaaatctccttaagctgataagcaacttcagcaaaatctcaggatacaaaatcaatctgcaaaaatcacaagcattcctatacaccaataatagacaaacagaaagtcaaaacatgagtgaactcccattcacaattactacaaagagaataaaatacctaggaatccaatttacaagggatgtgaaggacctctttaaccagaactacaaaccactgctcaatgaaataaaagaggacacaaacaaatggaagaacattccatgctcatggataagaagaatcaatatcgtgaaaatggccacaccacccaaggtaatttatagattcaatgctatccccatcaagttgccactgactttcttcacagaattggaaaaactactttacaattcatatggaaccaaaaaagagcctgtggagccaagacaatcctaagcaaaaagaacaaaccaggaggcatcatgctatctgacttcaaattattctacaaggctacagtaaacaaaacagcatgattctggtaccaaaacagatatatagaccaatggaacagaacagaggcctcagatataacaacacacatctacaaccatctgatcttcaacaaacctgacaaaaacaagcaatggggaaaggattccctatttaataaatggtgctgggaaaactggctagccatatgtagaaagctgaaactggatcccttcctcacaccatatacaaaaattaactcaagatggcttaatgactttaatgtaagacctaacaccataaaaatcctagaagaaaacctaggcaataccattcaggacataggcatgggcaaagacttcatgactaaaacaccaaaagcaatggcaacaaaagccagaatagacaaatgggatctaattaaactaaagagattccacacagcaaaagaaaaggcaacctacagaatgcgagaaaatttttgcaatctacccatctgacaaagggttaatatccaaaatctacaaagaacttaaacaaatttacaagagaaaaacaaataatcccatcaaaaagtgggcaaaggttatgaacagacacttctcaaaagaagacatctatctagccaacagacacatgaaaaaatgctcatcctcactggtcatcagagaaatgcaaatcaaaaccacagtgagataccatctcaagccagttagaatggcgatcattaaaaagtcaggaaacaacagatgctggagaggacgtggagaaataggaatgcttttacactgtttgtgggagcataaattagttcaaccattgtggaagacagtgtggcgattcctcaaggatctagaactagaaataccatttgacccagccatcccattactgggtatatacctaaaggatcataaatcatgttactatgaagacacatgcacacgtatgtttattgtggcactattcacaatagcaaagacttggaaccaacccaaatgtccaccagtgatagactggattaagaaaatgtggcacatatacaccatggaatactatgcagccattaaaaggatgagctcatgtcctttgcagggacatggatgaagcaggaaaccatcattctcagcaaactgtcacaaggacagaaaaccaaacaccacatgttctcactcataagtgaacaatgagaacacatggacacagggtggggaacatcacatgcaagggcctcttgcggggtggggagctgggggagggatagcattaggagaaatacctaatgtaaatgacgagttgatgggtgcagcaaaccaacatggcacatgtatacctatgtaacaaacctgcacattgtgcacatgtaccctagcacttaaagtataataataaaaaaaagacttacaaccaacagagagtttgaaatatatttaaattaaaagtattattaaaaaattctaaaaaaaaaaaagaaaaacttcactggcatagtaaaatagcacatgggaaaaaatcctctcaatttgctaagtcaatattcttataactgatgttgcttatatgtcattgttgttagatctgagagtggaaggaaataatttgtagttattgttataatgaaaaaaatgcaattatctaaagattcctatcattttctcactactccttaagcacatttattcattataatgtagaggaaggttgccttacttgtggtctcaccattcatctctttaagttcgttgttgattccaacatctatggaactcattattttgtcaatctgtaagaaacaaaaaccatttaaatggattgttacattcacttttaacattgtattttaaaataagtttcaaatgaagggagcaaatatttttgatgttattaccacagtgttccacagttaagagatgcatagcgaaatatttaaaggaaagcaaacatctttcggattgttttattaaaatgtaaagtatgttcccctttcttaaactttcaaaattagtttgccttttctttgtgtttcttgaaataaactttgtacttggatagattggtcatttaggaactgtgtattcttcaaactcagaaggactgtagataaattcatgtgacaaagtctctgctctctggcacccttcttcttctgcctaagaacatgcatcccatctaactggtaaaggagcaggtttcagggtgtggagagcacggccacaggagcaaagttttctgttttttgtttcgacagaatctcactgtgttgcccaggctacagtgctgtggcaccatctcagctcactgcaacctccgccgcccaggtccaaatgagtctcgtgcctcagcctcccaagtagctgggattacaggcatatgccaccacacctggctaatttttgtgtttttagtagagatgtgattttgccatgttggccaggatgtttctgaactcctggcctcaagtgatctacctgcctcggcgtcccaaagtgctaggattacaggcatgagccaccattcccggcctggagcaagttctaaccaaatggtttgaccaaccacaagctgattactgacatccaatcaccagcatctagtcatgaaaacaacttaattataagatctaagttaaatgttaattaatcctgcctctacaaaaggatctcagatgttattcactaaattaataaatataagaaatggctatacttgaaaaactaaccatctactagtatggaatttaaaggaagatatgatggtctaagctatagcaatttatggcttaatgactctcttgatgttagcaacctgaataagatagcaggtttcagaaaggacaatgggcattacttaaatgtcccagtttgttcaccctgaaacagatgcagagatattaagtgattttcccaaacagctcagttcagaatatcactatcagaccatatccatttctagttctccaaatactataatgatctattgtgcttctaaacctaatccaactggtacagtcttttcagagacaatatgtgatgtgttagaatgaaataccaagagagactgtatgaaattaaacactttaagtagaactgaaattggtgatatttgaacctcaaacatttttttctttatttccctgatagctgcaaaagggaaatatcaaatgatgtgtgtttattgtatggtggctggagaagagctaggaaactttatttactatgaagattctaaggagctcttctgaaaatataagatactttaaagaagggagacaaactaacaaagagtttggcaagtagcaaaacaacacagagcaaaatactgagctttttctcgatttgtcagctgcagtgcttggtaggacgagatgtgaatattctcttgtacctcatagctagttattacttctgcttgatatcaatttctatggaaacaatagattaacccacatgtgtggaacagtgtttgtttttatacttgctgtgaaattaccatgcattacccacagaaccatttcattccagttggagccgtatgcttttttttttcttgcttttgaaagagctaaaaagctgaaaatccttcccccaaacctccctcaactgcaaagccttataggatgaacagcaagaagaacaaagcttacttcttcccattccgatgtgaaggatggtgttctttcagaattccctttagaactgtgttcagcagtggaagattcactccagttaactcttgatgttttctcattggaaggataggcaatgagatcagaatcagatttagagacactttttgacaaatgcatgtcgatcaaggctttaggcaatgaccttattctccccagagtacaggctctctccacaaatccccctgcgttcataacccactggtccccattccgagatccactcctggttgatcttgtgccaacaatggtatggttttcgagttggttgctttttttgtgaaaaattgttctactgaccactttgggtttaattttctttaccaaaggttctgagttattttctattggagactgcttgaaaggcaaaggactgtttgccaaactgacttcatcttgtcctttttcacattgttctcttttcccatagagatgaaatggattttcaggggactcacaggctggagaggatccatggagcaggcctgcaaattgcccaggatcatattcttttgggggatcattgtcatcctgtcgggagaggtcatctgcaaaaggaaggaagggatatcagggtttataaaggttctgaaagccacgatataatagcagtgcccttatgaacatgtgggctatccaaacatttcatttactgctacatagcaataccttcactttatgaaatacccctgaccccacagtgccatgtatagaatgaatgtatgagtgtgtgtgcgtgtgtatgcatgtgtgaatcattctttctgatataccttagagttcatttcaaaagtatgaattgtgtattaattgaatgacttcattcacttctcccttgaacccagggtgtatgttttatagccaatgaacaaaattgggttttcttaaagtagaacacacacatctaaactctcacagtaaatgaatcatcgtgaagtagaacactaggcaggtaagtcaaggtcatatataatgacaaccctctgccctcctcccagcaaataaattcaaaaaccaaattttgaaaaaaggtattattaaaagtaattgaagtttaataatcctgatattaccttaaatataaatttaaaataattctatgcagattacataatttagacaaaaaaaatttgttcagacttaacaaaggcaaacaacgcagtatcagaaaaagagagactccaatataagaaactaatgtttagctatgaacacaaaggtagctttttctttcttctctgaaacggcattagctattttctaatttcttcagatctttgaagatgtaatgcagaaaagaaaccaatgatgaatgataatttttattcctttggatttttttctaagataaaacacacattttctctgagatttaaaatacaccatgctttttgcgacttaatttgtctttcaaagacatactgtgtaaaaacctggccaaagaatttagcaaagaaaggaagtgtcctttttttcagtgttcattttaattcatatcaatagctaaatattgccaagatgaaaatttaaattacctgataagcccataactcactgttgcaaagaactaaagtatagtaaatgtggtacataatgacaacaaatccaaagttgatgtgctgattcgtactttcagtaagttaattattaccataaaccccaaacactaacatttttataaattaacaagtaacatttaatgggtaagtgttatttactaggcactgaatgaggaattatatcatctcatttgacacccataacaatcctatgaagtgattattaataataattatgattttgtgatggaacgagatggccaaaatatcgaattctcacatttttaagaaattggcaaccataataaatcttattagacattggctcagaagatgctacaggcacatctgctctttatagtgaagattggccccaggtgtctatactgctctccgcctgggaactggtgaaagcaggtatattcctagctatgtatctctagacttcaccctggttcctgcttgatttttccaaagagaagatgtttgcctgcccagctatcataccagcatcctgagattgaagaaagaagagtgacaggaagagagatccaagacacatgaatctacaaatgcaacaatctgcatccatctactactattatactcactgtcttctcacaaaaacaaaacagaacgataaaacctcatcactttctaaaatagccacactgtcttgataactctctattttattttcctttcacaacagagaccattctaggggtagaatagtgagtggatagtgggataaggcagctttcaattctctccaaagactagagtttatcactgagtatgtgcatttttaagaagtcaaaactaacacttagacaacttaagacacagacatttccccacctagtaagcaattaagctgagattcaaattaaggtctatcagattctgacatccattggccttgcaaatatattgctattaaagataagctttaaaaaaatctagggttggtttatccataggacaagcaagtaggctctttgtaaagagacatgcttctcctgttcatgactgtatctggaatttgggaaaagtggactaaaagcatcagagctttttctttgttttgttttgttttcttcttggagataagctaatactaagaagaaaataagacctggcatcttgttccaatgcattttttttcttaggctacttggatctcacagagtgctttacaacataagcaggttggtatgggtgacaataatggggattaaggtggtaggaaggaggaattctgaaataaggaagttttagaatttcattttgaaagttgctgaagaaggataaaaggtctgaatttgaaaggaaaattgaaaagagcttgcctattgtgggaaaaagattctgtaaatctcagccaaaagagtttccgacgatgttcattatctagaaaaatgagaattttaggggcgtaatattatttaaagttttctgcaaatattattattaggttaccatcccctctgtagtttgactacaatgactataattaccaccccacaatgctttacactgtccaagtcctccaatcacaagcagtcacttctcaaagtaaaagataatttcattgttagcttataaagcttagttttttgaatagcagttcttagcattgtgatggtaacatttctgccaagagtggtgaaaagacaaatattacttgctttttccagtggccaaatcctaaagattattcaagtcaaagaaaaggagaagttgatatgaagcctcctggaaagcctgtgtggtggattgattgcagttatggccccagtctgctcacagctccctgcagacacagccctccccgtatctagtcctctcacgctgactccctcacagcgtggccatgtgccttgtaccgctcaatcagactgcagcaaatgtgatataagcagagacctctgaaaagcatgtgtgcattagacttgttcccttgttgctcttggaaccctgacaccatgtgaacaagccaggctggcctgctggatgatgaggtgacacattacccagctgtttcaaaatgtaggttttattatatttttcaggtatgttgaaaccaacagatcaggagacaattgccattgaaagatagacgctctactcattgatccgagaggcatgccacattataggggccacacagggaactaccagggtccatcaggaggaggctgacaaagtgaggggagattgtgggcaagagcctttactatggtttccatgaaaagaaacacacaaagcaggtataagcaggtttaggaatggctagtttgaatagtttcagcagactctggggcataagaactgtacctagttgtctggtcattagagcaggtgaatgaatagtggcctagagagtgagagccagatgaaggaggtaattgggactatgggctctacgattgttagtttgcataagaaaagcatgctctctggtgagctgtttactatctctaggaattagctagccccaggaggggccgtccctccacagcaagagctcaagagaccaaagcataaaaataaaaatacacaaataaaatagaaaataaaaagacatggttaatacatccgccagtcctgtcaccccaaccaaaagccagccaacttccacctatgtgagtgagggcatctaggacctaccaaattcaggccattctgccaataccaccgatgcatcagcaagcacagctaagaggagctgaggttttcccaggccagaagaagacacccaccaggatcatgagcaatattaatggccattaagtttgggagggtttgatatatgaaaatataaactatatcccaagttttaaagaattaatatattcttcaaaataaattctggcaatgtttatatttccacatctggaaaatgatgatagtaatagaacatacctaaaagtgctgtgaagattgaatgaaatcatagaataataaatgtgttagtccatttgggctgatataacaaaatttcataaaccaggtagcttacaaacaacagatatttatttctcacaggcctagaggctgagtagtccaagatcaagacacctgcagatttggtgtcaggagagggttaattttctggttcatagagggcaccatcttgcctgggtcctcacatggtggagggagcaaaggagctctctggagtctctcttataaggtctctgtcctcatgacttaatcacctaccaaaaggcccacctcctattaccatcactttgggggctgggatttcaacatatgaattttggtagaacacaaatatttggaccatggcaagaagtaaaacagttagaacaatatatgctgcatagaacactaagaatatgtttctactattataacaataatttttaatctatagggtttcatttttataaagaaatacagtaataactgtattagacactcaataaagattattttgacataataatcatgtgggatttactcctttgtttctgtttgtatattttaaaaagtatactttggaaagaattttttgtgttttcttaccctttcttcagacaaaacggaggaaaatatacagattaaactgttgtcataacttgtctcatttaattttacacttctcttttgataagtggatatttcatgccaaggtacagaactaaatatgtgtgaattccaatctgatagttattcaaggcatcattagcatttcaaagaaatgtcagagtaaatgtccaataggaagcagttcaatctctttttatccacctttgctatgatttttatcacctatatatcacctgattaacaataaaatccaaaatttcatgctatggaaaaattatagaaaacaagttacttttttctattatagagtataacttttgtctattgggtcattgcatctgatttagaaaataaaaatttttcctatttttaaggataccggggctgatgttgatattagtagaaactgtgaatttatttcacaaatatgtataaaacgtttcctgtatatcaggtggcaaagtttcagcagtgtcaaaggcaatgtcctgccttcatggtgcctacattccagcagaaaagatgactacaggcaaatcaagaaatgctataatttctgatgatggtatgtgctgtgaaaaaaataaagcaaagtaatgagatagaaacgaaaggaagatgctataaggcaattaggaaatgtctttctcaggagctgacattgagcagacatagaaatgactgtgaaagtgtaaatcattcaatgttttgggggaggattatttcaaggcataggaaagaagatatgaaaagtccctaaggctggtaagaacagtaagaaggccagtgtggctataatagagtggtaggggattagtagaatggctgacgattgaatcagagatgcaggtaggaatagggttggggtgatatgacttatacttttagaagataattggtatttctgaacatgacaacagcatagtgttctttttaaattattcacctcaattctcataaaaacaagacacggggatagtaaaagaataaaatgagcacatgatagcaaaataaaggaaaaacactacaggtgatatctccagtaaagctaagtattaagaagtccccatggccccgaaacacagaggggtgtagccaaatcacatgacagcagtaggatccggaactgaatcagcagtgatgcagctatagtggtgaagagaaagggaaattcaatggcacctacaagccatggaacccagaaattgccatcagatactgatttcccaaaggagagggtcttgtgctaagcaggagtgtgcagtaaaatttgagaacaactagcagaacttgtacacatcttgtaacaagaccacaggaagtagcttactcccttgagaatatcagaaatctccaataaatgcatacttgtagtaggctacagatccactctgaagaaaaacttctgggagaagaatacaaattgcacagggtgaaaacaccaaagatgtgagggagaaaaacatttcatataatggggcagtaggggccaggtgcagtggctcacacctgtaaccccaacagtttgggaggccaaggcgagaggatcacttaagcccaggagtttgagaccagcctgggcaacatagcaagacctcatctgtacaaaaagtgtttaaaagaaatttaagcatgataatgagtgcctgtgagttccagctactcaggagactgagatgggaggattgcttgagcccaggagttcaagtctgcggtgagctttgatcatgccactgcacttagtctgggcaacagagtgagaccttctctagaaaaaaaaaaaaggcagtgggggtggcatcaggcagatgtccagtagagggagactttgaatgtaatagaatagcaaagcacagtgttcagatgtgagagcaccactttggaaggcaggcgcatggaactcaagaacactgaggtagtagcaggaagccttcctgaatcaagcagagaaaaacctgtatttcttaatacttcatcgtaactgcaaaggagaaggcccttgagatgtgaagggctcatggctactgtggctcatccctgctcccatacaggaatctcttcctaatccatgacatcccttctcattaaacgtgggaaacaaaaaaggatttagatagagggcaattttaggaataaaataaataatgacagtaatggattataacccactgaataaaacagaaagacacgagcccataaataaacaaatgatttaaaagtttgactaggaatgggaatcctaaataatttcaaattgcctccccacaaaatacttattaattagaaagaggaaaaagagacacgctacagtgaagaaatctgggaggccctatcttaatcaaatgatcaaagtgaacaatatcagtaatggaacaaatcaaaatcatatccagtgtggtaaagatgcaatgagaaaaatgcagaatcacttttggattttcctgccaaagatgtacaacctaaatctaattatataggaatatcagaaatatcagagaaatccaatttgtgggccattctacaaaataattggcctgtaatcttcagaagtgtcaaggtcatgaaagtcaaagaaagtcaaatgaacccttccaggctgaagaaaactaaggagacattacaactaaatgcaacgtgtgatcctgaactagatcctttgatcataaacaatattattgggtaaaccagcacatcttgaaggaggtctgaggaatagatgctagtgatgtattaactttctgatttggttgcacggtggttctgtggttgtgtaagaatgtacttgcctgtagaacatatacactaaattagtagttatcaaagtgtagtccagggatgcttggggtctccaagattatttcagaagtttcatgaagtcaaaacaattttcagactaacactaagacattatttgcccatttcactttcattatctcatgagtgtacagtagagttgttcagaggctacatgatgtgtcttttcacagtggaaatatgtgatgcctctttctatctcagctgtaggaactggcacgctattacttcttgacagaagaaagtcatatgtctaaacctaaagtaaatggagtgaggatgtaaatggccacctatgctactgcactgcaatgtaccatggcagaagagagagtaaagaactgagaacagtaatctcatcttaaaaataatgtttgctctaagttttgggtagatgccctttattaagttaaatgtcttatcttctaaggttgctgagaattttaattgtgactagatattgagtttataaagaatgtttttctgcatctgttcagttatgtaatttttctcctttactctgttagtgtgaatgacatttgtacattctctaatgttaaacattagatattaatgggataccaacaggataaactcagtgtggtcataatgaactttctttttggcatcctgctagatttggtttgttagtactttgggatctttccatctatgttcatgaaagaaataggcctttggttttaccttttttattctgtctagtttttacatgattactcacctcacagaaatagttggggaaaatttccatttccctagaagagtttatataagattggaacgatatgtttcttgaaagcctttatatttactttacctttaaaatcatctagactcaacatattctttgtggaaagatttcaaattattcattaaatttatttagtatagaactatctggagtctctatacctttttgaagttttttaaagttttaattatctagaatttgtctaatttttctcagtattaaaattcactggtacaaaattattcattcttctttcttaactttgaatggttttttgtatctgtagatttacccccttttctttcctaataggtttatttgtgcctttttatcttgatcattttgactggaaagtgcatccatttttttagtgtcaccaatgattccatttctggctttgtgaattaatattacatatttgttttctatttcattcatttctgtcctttactattttctttctatgccttttctggatttattctattatttcttataaaatttcttaagctggcatttacctcattagtcttcagcgtttcttcttttctaatatatgcatttaaaatttctaagttccactttatgctgcattcatcacatttgatatttagcatttatatttttgtttaactttaaaggtttttaagttagtattatggcatctcctttaactcatttctcatgacttatttagaaacgtgtatttaaattcataaatatatggggatatatatgggaatcttaatttaacttaattgaattatttttagaaaatatagtgtgtatgaatatgagtctttgacatgttgaaacttgcttatagtcaagatcactttttgtgactgtttcatgagaattacatgtattctccaattgttgaatacaaagctctttgcattatgtcagattaaatttattaatggaactcttaaactcttccattgagtgaggtgtgttgaaacctaattttagcagacttatgttttttcctatgaaatatatgtatattatatctggccaacatggtgaaaccctgtctatactaaaaatacaaaaatcaactggctgtggtggtgcgtgcctataatcctagctactcgagaggttgaagcaggagaatcgcttgaaccagggagttggaggttgcagtgtgccgagttcgtgtcactgcactccagcctgggtgacggagtgaaactccatctcaaaaaaaaaaaagaaaaaaaaaagaaaaaagtctaaagttaaataataccttatccacttccttcctaaacaatttaaaaactttagagcattttacattcaattacttcttctataataaatattgttgtcagtgttttaattattttgttagctttacaaatcaggtgttattattttattcagaccatttttaaatttcaattggtttacatgtttgccattttatttactcacaattcgttcctcagaatggcctgagatcattttccttcttaaagttattctttagaatttccttttatacaggtctctggtggtcaatgctctagttttcaactgtgaatatctttctattttactctcatttatttaaaattcataattttaggttgatagttattttctctcacagtttgaagaaattattccacttttttgtggctttcatctttccttgttaattctgctataatgatacctgtctttcttgtgggtgatccatcctttctctccacctggtttgaaaatctctgtatttttcaatttcacaataatgtgtctcactatggatttctgtttatttatcctgcttggaatacagtgtgctttctggacctgtgaatccatatttttatcagtttggaaaaaaatcagccattatccatcaaaaaatgtcctctcctacattttttaaaaaaattatttcatcccggccgggtgcagtggctcatgccgtaatcccagcactttgggaggctgagacgggtggatcacgaggtcaggagatcgagaccatcctggctaacactgtgaaacccggtctctactaaaaatacaaaaaattagcctggcattgtggcgggcgcctgtagtcccagctactccggaggctgaggcaggagaatggcgtgaacccgggaggcggagcttgcagtgagccgagatggtgccactgcactccagccggggcaacacagcgagactccgtctcaaaaaaaaaaaaattatttcatcccgagtctctgattcaaagttaatcttctgattccatacttcatatctcttcataccttccaaattttctgcctctttgcccctctgtgatacattttggggaatttttttcaaatgtatccttcagttcatcaattttctcttcttctgtgcataatctgctatttagcctattcatttaggattttaaaagtaatctcaagtattaaatttttcatatctgaaaatgccatttatttttcaaattttcctactattatagtcaccattttttactcattttaatgataaggcatattatttatttaaatattttgtttatatatagtggttctatttcttgtttcctatttccagtaataatatctatagtcattgagcgctaaatatgtctgtgttatttttgttgatatctacttatagtggtttgcttttcaaggtatttagaaataatttattattaactttattacttgattttaatctatggaagcttgtcaatctcatcagggaaggttttctgcagagagaaaaccttgtgcttccctgagctgtgttgactcagccttccagccttccagctgagccagggaacagtgtcccaaatagcaacactattattcccatctgcactcagaacaacaacagccctcctctcttctatcagatgtttttagagagcaagagtgactggagcaggcaatgtctcaagaacatgtcttattcagaatatatttgttctgctgcagaaagatctctcagagtacctagactgacataatactttgaagcataatatttttatttaaaaatgtacatttgtgacaatttcacttcaaaaaaaccacagtttattaggaatcaaaagtttttaacgtgactctttaaatgatttgtaccctactacataggtagggttaataataaattgccttgctctgcatgtttttgtcttgtaatgtatgatgtaatatataatcaataaattatcctgagaattgtataaacgaagaacaagcttattttaattaattatggcctcaaataaagcaaatccttttaaaataagatccccctaaaaagtatatttataaagaacacaaaagaaactaagggaggtttggtattttgaaagaattccaagtagtctatgatcttcatttaaaaaaaaaagcatgcaaaataatcatagagtgtgttttgtacataaatcctggatcaacttgatttgactaaagatagcaaggagctaaactttaataatatatactgtcaacttgtctcaacaagcttttaaaggagtgctgggttttagaaatattagggagaaatattatccacttgttttttttttttttttttacttataatgtaaacttatgtgatgagctagtacattcatttttttccaaatattgagaaaatattttccagttcactttccaggtcaccttcacattgagatagaagtgtgagtcaaacaagtaacaatgagccacagaggaaactatgtagaactgacattcccttaattccccaatgtaaaaaaatcaattatagtttccaaacatacaagaaattaatttaagcaaactccaattttctggaaaggaatttatttcaaaaattacaaagaccaagattccatactaggtaaggggaaccaccaatagatattgtgtgccttctatgtccaaggtcattctatctcatttaatcctcacaaaagtctctgaagtaggtattatggcatttgcactgatgaagaattagatagctagtgaacagaggagcccgtatgagatataaatctggctaatgcaaagccggcttttttccgatacatcacgacgctttgtgtcggattaccctagaacctcctatggcatcagtacaatgcaccatccactggagtgtcctatccaagtagcactggagcttgaaaaccacccagtgggcctctttccaggtatcagtagtgatctttgggtatttattctgattgcacaattagcccaaagattgctggtatgtttagatgctgaatggtgttagatagagcatgtaataaaattccctcttctaagcaacttaagaccggcagctgcctttctgaaaagccacccaggtaagctctgttgtttcctggtctattagccctacactctgccaaactcagcatttactgcggaagccagagaatgctgacattctgacagctcttggacagcagaccatgctgtttgactctgatttcaaacatttataatcttttctcttgttccctttgctcaatacaggagagaggctatcagccaatttccccaccgtttatagcaaatcccaaggctccctcatttccagctgctaagctgcctgggcagactgtattactaaattattgtatctttttggtagagtgcctgatctgtcttggcatgcgctttgcattgaaagaagctcctgttgcaagcaaaggaagccagcgacattcacccttcccacacgtctttcctctgttaccctcaaccactaacttctttgtttcccatgtataagccaagttcacaggggcagtttctcagctatctctgcctccctagggagttaaggatttcaaagagagttctgtgctaggagtatttcccatagcctagagccagatgaataaatggcgtctagtgaataactacatcagaaccaagaggttttgtttctctcttaccaaaatgtatttctttgtaataccacagtcactgtaaccatgtattttcctcatcagaagagactgtattgggggaagagaggaaatagcctctttaactcaagtcggttgttttcaagagtgttggtcctttggtttaacttattttaataacttcccatttatatactatcccaatggattatgaatgtgaaaaaagaactattctgaagaaataaaacaaaaaaagatctacgatctttaaataaaaaagaaagtgattttgtaatataaaagggacagaaactatttttaattactctaaaatgaataaccactccgattcaattttcaaaagttataccttgaatttgaattcaaagtcacccaaatgtcctcagtaaaagctctgagaatgcagtgcattcaaatgtatcctgtgagttttctattcctgtaagcaatgaacagcctagatttttctcatacgtatctcaagagatacttcatttcaaaagagcaggagagttatcaaaagtgtaatactattaacaagatacaccatagaaaatatacagaaacgttaaagataaattatatctagggagtatgttttaaatcaactttgctgttgctatggtaagagatatccaatgtaaaacaaaaatcctctataaggctttggtgctatagccatggcaacaatgatgttcaactctgcgagtgtttccatctgattcagagagaagaaaaaaatatgctttaaatgtatgtaaaatggcttagaaaatcgatcatttatggttatctttcacatgacccttcaaccaattaaagaagacattgtaaagatagcagccagagagcctaaacaaaaggctcatagatttgcttgggtttttcatgatcacagaagctggaaagatccactttagctgaggtgttggtaaatgacatattcatttagcaactatctcacagaaattttcaggttggggcctcatgtaattttccatgcataggaaaaaactaaatgcaatcaaatgacaatttctacctctttaacacaggaagagaaatattaacctaaagtaagaaaatatggaaagtggtgttctagctctgcaaaagaaaagtctcttaaatgctagtctcttaaatctactccaaataggcttttattccacctacctccaccgaatagcccttaacaatatcagcaaaatctctaccttcctgaaatgaacattcataactctcatcttacttgacctaccagctatacaattgatacagattatcacctcttggatgaaacactttcattaactcccaaggtaccacactcttctggttttcatcctacctcctaggctgttccttctcattctctgctcattccttctgtttccaaatgtggaagcattcaagtgctccagggcttggcatactgggacctctttcctgtttacattttctgtttacattaattcctttgctggccccagggtttaacatattactgaaacaactgcaacacccaagtttctgttttcaacctgacttctcccccacactccagacttgtatatcctactgtcttagttatccttatgcctccttttctctcacaccccacagccaatcacacagcgaatcctggtggctctacctttaaaatataactgcaacctgcctatgcctcacttgtccttttctccctggattattgtagcagcctcctaaccatctcctagctttcatttttgcacctcacaggcaattctcaacatagaagtcagagttatcttagtaaaactaaggcaaatcatgtcactcctctgctcaaaactcttcaatggcaccttgatccactctgagtaaaagccaggatccttacaataacctgtgaggccatacgtgatctcagacctgtggatactctgccccaattctcttaaataacataagctcctactacactccttttcccttaactgacatccagctatattgcctcttgctgttactccaatgcattaggcattcttctgggtcatgacctttgtacttgttttttctgcctgggattttcttcccttaggaagtagcccctcctccaacaccttcttcaaatatctattcctaacgaaaccttacttcataattttttcaataaggcctccatggatcacaccattttaaatggcaaccactaattcttattcccttccctgctttatagtttctccacgacacctataaatataaaaaaatatatattttacttacttatgctatcttaggaggagagacatttttgtccctatcatttcattgctatatccagaaattagaacaaaggctggaacatagtggataatcaataaacattctttgactgatggggtgaaataaatatatagatatttgcatgtgaagaaaaattcaagagtgatatcaacatagctaaatgttaacagtgattaacaataagtgactttaaaataaaataaccttttattctgtttataaaataatatctgttcattctagttattagtaaaagtaaagagagaagaaagacactcataattccaacacctaacaaaagttactattaacatttttatattttttcttttgttttttatggacattattttcccccaatgaaaataagatcactctgtttatgtaattaaaaaaaatttaaatctcacctaaaaaattgagacatgtttattttatttgtctaaaaatttattgtctaaaaaattgagacatgtttatttgtatcatatcaatccttgaaatattcaaataactgatacatttgattttgtttctctctttttataaagtacatttggtcttttatagtgactaggggaatgtgtgtgtgtgtgtgagtttttgttagtcattacttttatgttaccgaaatcatcttcggacctgttttctctgttttcatcagtaaatttttgtttctctctttataagttaatagctaatattactgagtgcttataggtgttaagtacttcagatgcattatctgatttcattcccacacaatgttccctcacataataccccataatactctggggtattatggtattcccatttcgtaggtgaggagttgaatgcttagatgttaagtaaccaatcagggttacagggttactaagtagtggagaagcacatgaacaaggtacccatgctccttactgttaaatcatttgcagttctaaaatgagggaattagcagacttgttatctctgttcccctgactccccactcatgcccacgccccgttttccaatttatattaaaatagtctgggttgtaaagtgctgatactatattactgtatattttataccttctcttttcaatttcttttagatttatagtgttacaacaatattgagaacaattagttgaaaacattttatgtcttacaagctttattttacattctagaatcctttatgctactatttcccttgcccattcttgagaatttatttatcacttgatcaactgaagtatatctttgagcaattacttcaaagagataggttgttttctaaattactgatatggtttggctctgtgtccctacccaaatcttatctcgaattgtaatccccacttgattggatcatgggggtggtttcccccatgctgttctcatgacagtgagtgagttctcatgagatatgacggttttataagtgcttgacagttcctcctacacacacactcactctctcttgcctgccgccatgaaagacatgcttgcttccccttctgttatggtgattaagtttcctgaggcctccctagtcacgtgaaacgtgagtcaactaaacctcttttctttataagttacccagtcttgggtagtatctttatatcagtgtgagaatggactaatacaattacatatctgaaaatgacttactatggtcttgcacaccttggctgggcatacaattcttgaatctcaagttcaaatccattgccctaaaaattctatatacaattccccattgtcttctgtaagtaatctgttttattaccttaatatctatctagattcttatatgactttttccttatccttgaaattataaaaatttaaaattcccttctaaaattatttatttcagaaattttgctaaattcagtaaatctgtaatttattattctaggcattctttagctcataaacaaacaatgagagttttcttttattgatgctttacttcactgctacacttttcgttctaaaattcctatcatatgcatattggatctcatggatctttcccctgtgttttatcttttctcttgtaatttttatttatacatttcttctgtctattaaatgtcttaatattctactttactgacttgggtttctcatgatccagtgtattttttgccttctttacagttttgaatttgatatgaatattattcaaccacatgaagcgtttatgatcttacagttttaacccttcatgactgcttagtctggtttcatgcagcgttagtctactgaatatcattgagatccatttgacgttagcattttggaaaatgctcttttcttaagaaaaattttacgtcaaaggatgccactgttttcattcctcaaaacgagccttctcttttgaggtatcatttaatgtctccagctctttctctatttgctcactgttgcaaagggtggtcttagcttgtctcttttggggacctgggatgagttctgtcagggacttaggaaattctccttttcacctttaggattcaaaagagagaagaaaggaaaagcttaggttaactgccagttctgccatattgcacaactctagggtccttcattcacatagtacaaatgtgcctcctgcaattgtggctggtggtggccatgttcaccgcagttttacttcattggcctagtgtagggctgttcagtagaattttctatgatgagggaaatgttctatatctgtgctggccaatatggtaaccactaaccacacatgattactgtgcacttgacatgtagctggtccaaatcaataatttaattttaaattcatttaattttattaacttaaattttactttaaatagtcacatgtagtagtggctactgtaaaggacagtacaggtctatagcagtggttctcatagtgtggaccccagaacagcagcattagcatctcctgaacacttattagaaatgaaaattcttaggccttgctctagaatatctgggggtgggccccagaaacctatacttttacaaactgtccacttgattctcactagaaatgcatattcttaggcctcacttcagaatacctggggatgggcccagcaatctatatttttacaaactctccacttgattcttaccattaatgcacattcttaggccctgctctagaacatcttggggtgggcccagcaatctctgttttagcagatcctccatgtgattctgatgcacattaagagatgagaaccactgctctactgatcacgagttaggagaggatcagaactaacagcagtcacaaaagggacttttttctctattccagtgtttcttttctatatttgaggtgagctgctaggagttaactggggcagtgtcctcattcttcgcttctcacagttgtcctcattaagaaccaactgtgacaatgttcccctcagtgtaagtgaagagtaagcaagtcatgatccttgctttccagtgggactggcaggatccaatggtacctcctcactgcccccatgtatttctttacttcgtgctttaaccttctaaagtcttctccagttactaccatggagagttcttcacatacggggaattatatatcttcagtccagttcagtcttcaatccacttcactttgccttctatcttgcaagaactcttgaaataatcagcatgtagatgtcacccattattaacttcccatactaatacagatatttttcttccttacttttatatctgttggtcatttccaaggtaatacagaaaggagtgaactagaaaaatgctttcagtcttctgcttttccaagaaatcttccatctttctcttaatgccttaccttatatgaaatattaaaagtttttcatataattctatagtgttttatatgtatcatttcatctaattaccaaaacattccagtgacataggttttattactgtcattttccagacaaggagactgaggcttacatggtttaagtgagctatataagaggaatgggtagagcatctgctttgtaagggtctctgatatgcagaaaatgatggctaacatttattggatctttattacggaccaagcattgtgataagtgttttttatccattatcttatttaaggcttataaaaatttccattttacagataatgagcaacactagaaaggttaaataacttgtctaattacacaactggttagtaaaactgcccatttccatgccctggtttgtctgactctagaggttgtgctcttaccggctatgctgtattggtttcttggcctggaaagtaatcaaatggcatgggcagagtaaagagtataacatttcggagggtgtccttacatctcatcatttatcacacagtgggttatttaatttattttccataccactaccaagtctacagtcacgggtttaagggttaatagaaacccattaatctctggtaattttaatattttgcttattttttcttactctgaatggaatccctaaaaccatatgagtcctaacttttatctccattcattctaaatatttactgcacaactactgcatgccagacactaagcgaggtgctgtgttcttgatgtttgctaggtagctgagcaatagtccctgtcaaaacgtttggtgaattgcctggtttactgttaaactctcctcccagtctgcctttgttatgaatatgattatggattcactgaaaacttcacttgaactttaagtatcataagagtatttggaacaaataggcaccttgattgcaactccaaggagttctgtggcttccttgctgcaaatttaaaagagagaactccatctccaaatcagtgacattcagacatgtgcatcactataaaggacaagggtcaactcaccatccagactagtttgacaggaacaattcagagatgaaagagctgctttcaattgctcaagcaatgaattttccatacaatgcacctttccagagtcatgatcaaaggaatccttgctgaagcctgactcacaacacagggaaataattttatgcctaattttttttctctcctgactctctctctctctctcttgctacagatatgtcagtactaatttagttcctcttataaaatagaattaaaatatcttacatttttggagcctgttattgtttataaaatatatacatttccaaggtgtaattaaatataataggataatctgtgaggcaggtactatttcccccagtttgccaataagaaaataaagattatttggctgtacattcattcattcattcattcatttattcaatcttccaacaaacatgtatcacactgaggcactagagtgacaaaaattaatcaaacaaggtccattatcttgaacagcttatagttataaaacatacaaccagacatattataacatgtgtttttaaagaagttttgtgagcttcagaggaagacaaaataaaatctttccagaaaaagatggagccttggaggacaggtaggacttagatatgcagaaatgagtgaggtgcattccaagcacaggaagcatgcacaagcaaagatatggagctcggaaagtacagacggcacaagaaaactgagttgttttgtatgtatgattgctgaaagaagacatgaagggagaatggtgaaaaataaggttgcaaaggtaggttataatgtttgagggatataagtaatctaaccaaagtaatcagcataagtgggactcaaacccaaattttactctgcagttggagctcttaccttgctagtgctatattccaaacttcttaacacagtatatagctcaatcaacttgaaaaaatagatacaggactatcaagagaactcaactcgtttttgaaagccatctatatcattctttcatttaagaactgggagatgtatattttaaggcaactgatgcacaaactctatagacagcgatctcagtatctgtcatattaaaagtaactgtgtttttctgaacactactagaattcagagcagaaatatgagtccccttgaaaaaggggacaggaagccctaagttgttaagcagttgcttatacctggatagatcttgttcactttattgtaaatggaagtgggaatcttggttgagtgaaaatcagaccggctaagttctcagttccatcaatgtttaaggcatgcaagtggtttggctgttatgcctatgtcaccttggcctcttctatgagggccacaacacagagttcaccccttgtaatttttgtccccagtgggtattcactgcctgactcagaactttgaaaagttggagacaaaggtaatgggcataaaatgacccccaactccaacacatacacatgctggtagtgatataaagaaatgtaataggaaagcataatttccttttttattctaaattaaaaaacaatcactttcctgttttatgctatagctgacacaagtagtagaaaaatttggaagcacaaactgcaacaatatgacagtcaagggcatggactcactgatgataaaaagaaaggagggtttacatttccaaatattctccacttctgttatctttttattagggaacgccatttgagacaataagttctgtctctggaataaaatctaacatggaaagcaaaatgaaatttatactccttattaattcattgtgcataaaatcaggtgtcattggttgtattgtgtaacggcttgctgaaaatcattacaaatacacacagcacaattctagtattactttaaaatcagcttccccttgaaaacaaaatccggatattttttataaaaatacattctctaattcttatctgggaaatggctcctaaatgaacagatgatacctttgcaatttgaagttaagagctgcttatttgtcactaaggcagttagttttgactatgcagttttcgttttatatcaagcaaatacatttttttattttcctgttttaaatattattttcatggttacatttatttagagaaaattatctatggtttacacataaaagacaagcatcaattgagcaaattatggcatttataattaaatgcttcttgtatgcagtctccaacactgctaaaggaagccatcactctaacaaaatattgaatatgtttagcataaaattgcattaaacagaccctcagaattcttattaatttatttgggatgaaataagcagattttttttttttttggtcacacgttttcatgtaaattcaccaattcaaaagacttgcttattattcttatttgagacggagtctcactctgttgctcaggctggagtgcagtagcgcaatctcggctcactgcaagctccgcgtcccgggttcacgccattctcctgcctcagcctccagagtagctgggaccacaggcgcccgccaccacgcccggctaattttttgtattttttagtagagacagggtttcaccttgttagccaggatggtctcgatctcctgacctcgtgatctgcccgcctccaccttccaaagtgctgggattacaggcgtgagccactgcacccggccgacttgctcattatttttaaaagcatattttacatgagtgataccggggtacttgataactgactgagccattgttccatttgaaataaaaatatggagacatttcaggtgagaatttttggcattaaaccaaagaatgatgaatagtacatttttcaaaaaagatagcaacaatattaaaaaatttaacaaacagagtcccttgattaacagagactggagtgaaagtgaggtgagactgtgtgaaactcacaaaaggccccagttaggttgatcagtggggttccaagacataactttgaaattaggcaatccttgactcttccttctctcttacctagtcagtatctcagcccatcggattttatctccttttctaaaattgaaatgctttgctctttcttactcagacttttccttttctcattatgagagctcagctcaaatatcacctcctcagagaggcctattctgatccctaatttaaagtaatcatcctcttagccctcaccccacctactactcactgcctcctacctcctccagtcattcctatctaatgtatcatcttcctattttatttacctgaggttacttatatttgttttcttgcttattttctgtccctcccactagaatgtaagatttatggaggtaaggacattccatgttaactgttgaatccctagtgcccaaactctgtggcaagtatttgaaataacacctatccacagtgtcctaattcaggtccttataatatcctgtctgggtacctgtaagagttccctggatggtttccttaatatcagcctcatcttcctcaacccattttttgcactagagctggattgttctctgtaattcaaatctaatgatgtcactccattacacaaagctcttcattggttcttcactttccaaatgaatattgtcgaaccatacagagtggtgtgcagtatcactttaagtagttcaaaaaagaatattttaatttaatagtttttaaaatttattttaatatgcgttaaaacaaaccatcaattagcacattaacgatttcacagatcttattactgaagatgagaaaaaataaaagttataatccatttacagacatggaaaaattaatgaatgtgtctttaaaagagttttgaatgtgatcagagactaatctaaaggataaagcccaatgccttctcttcagtttcacagagtccctgcctatctctctggcataacattcactacttcttgccttgcgctttatatcttggcaaattcaaattatttgcagctccgccaattcatcacattctttatggcctctctctttttagttcagttatctcctgtgcctagaatgcctttggttggctgctttctccctgtttactgtcacatggttagctcttctcattctgtgactcagctcatgaatcaccaacttcatgaagcctttgttgtttgtttgtttctctttcctcaggtttggttaggtactacttctttgttctcccttaacattctgtaaaaacgttttgtttatacctactgcattgaaaaataactatttgtgcatatctatccttcaagtgaaatattcctaagattagggataatgttttctttacattagtatccctagcttctattataggacctattctgaataggtgctcagttaaaataattagttaagagaaggggccataacatcaataattaaaaagttaaattaaaaagttgttcacccacagtatgagacacatcatatatttattcagtcagtagtcagtcaataaactatatatatatatatatatatatatatatatttactaaatgttaaaaagtatgggcacttaaaactagtttgtcgaagagataaatgaaaaggtcttagcaacatggcatagtaggacctgttggtggggaagaaggatgaaccaagactggagtgaaggaaggattgggtaatagctggaggtaacagttgattttattgattataaatgttacatctcatcagagatggtaccacagtccatacttaccaaatcaaaggtgcatgtgggaatgagaattggtggtgctaatagaatacatgtcagtgaaactttcagatatcagatgttctgttttttgtctttcagttgggagatggaatcagtgattatcaatgttcacctgataacaccgcaaaaggggccagggcaaactgctagtaggaactgtgcagagaccctagtatgaaaaaatttattcaataaacagtgtcttctatggaccaaacactgtggatatagagatgattccagtatgatattattatggtttataatgaccataagtgattgctataaaagaagggaactgttgtcgagcttcagagctaacccagggattacatctttgttagacataatagattaaggccatgtgactagaacactcttttcagaaaactttgttagtgcttgagaaataacattaaaatccaagcaaaagacaattctgggaaaatgatgaagtaggaagcaccagaaatctatctccctgcttagacaataattgctctagcagaatctgtctactataactattttggaactctggagtataatgaagacttgaagcgtccaggagaaggataattgggatatccatcatgttaaacatttatcctgatttgaccaatacacactgtacacaggtatcaaaatattacatgtagccccaaaatatgtacagctattatatatccattaaaaatgttaaaaataaaatttgaagtaaagaattaagtaatttcctttgcttcactaattagcagaaaatttgaacataacatacattttgggagtttggattataatcatttttaaggataaaacctataaatccctttcttctctagaccatttgagagactttttataaaaagcatcatttgaagatatgcttttatttttttcttataaagcttcaataatctcttgaagttgttcatacacttctacaatgcatttgctattccactgattattgtgcagtgctattactgaccctaccaatatctctggatcatgctacatttggagaataatattctcccatatatccaacatgcagtggtgggacaggcataggataacctctacagatagttgcaatcaaaaggagggaaaatggaagttgagcaagttactggtctgtagacattctgaaatccagttgggtgcagattgcatttcttgagtagggctccatcttattggagttgttcactattgttcttagttctactttctgggtttttgtttcctccctctgaatgatcctacttttcatataagaaacattcttatgcctgctttctgttcataaaagctcaggggcccaaaggtctcttaatatattgtactttctctgtcccttctattccaagctagggatgcttccaccagaataattatctaaaaacattgtgggatttgtgtttactaattgacaattcgcacaattagataaatgtcatatccacaaatctttctgacataagtctttgtctaccttgagttccctgtaagactgttgtatgactctctacaatcctgtccaacccacggcccatgggctgcatgctttgaatgtgacccaacacaaatttgcaaacgttcttaaaacattatcagattctttttttttttttgcgattttttttttttttttttttgagacggagtcttgctctgacacccaggctggagtgcagtggcacaatctcggctcactggaacctccacccctccaggtttaagcaattctctgcctgagcctccggagtagctgggattacaggcgcgtgccaccacacccggctaattttttgtattttttgtatttttagtagagacggagtttcaccatcttggccaggctggtcttgaactcctgacctcataatccacctgcctcggcctcccaaagtgctgggattacaggtgtaagccacggcacccggccttttttgtgatttttttaaagctaatcagctattgttagtgtattttatgcatggcctgagacaattctttgtccaatgtgtcccagggaagccaaaagattggacattgctgctctgcaatgcccttagattctcagaacccttattttttagggcggaggagactcaaggcatgcccttaaggtcttaggtcttctgtcatctgaaagtttctatgagtcactatatttgatcttttgagggcttaataaggagttttgtaagcatacccagggattacaccttagactttacttccctgatagcgctctggatttgaactctgacccagagctatttattaattttagtttcatttgacatctggagagactaagaacaaaaaccactttttttttgtacaaataatcttgccccctttgtaatgaacagtctgttcttttacttatctctgttttctcacattttgtcatctaacaagaagaagacaggtggcactttcaataatctgcctggaaatcttagattgtcattagatacttttactattttccatgttattgcaaccaacagaattgccagacattctgccaccatattacaaaagtctcctttcctccagcttccaatcacattttccatactttcctttaagctcccagggacgatctacccagcgcttctgctaacacctgcctttttagtctttccccaacattcttcatgaagcactttcactaacactttttcaatgcccttttagtttctgcctgctacttggttcaaaacctacaccatatgttataggatactataatatgacatgataatagcatcatatttccaggtattaaaatttgttctagtcctctattgttacataaaatagtatcttaaaaatgcagtttcagtaagacagtggatgggactggggtcaatgcaaaggttttctcactcacatgtttggtggttaatgctggctttcaaatgagactttacttgggttgttagccagaacagtacacaggacttctccacatggctattgtgcttccttaaagcatggtggctgggttctaagagtgagatttccaaaggaccaggcaaaatctacattgcctcctatgaccctagtcttgaaggtcactttttaataattgtttttattttaaaatttttgtgggtagatagtaggtgtatgtattaatggagtaaatgaaacattgtgatacagccatataatgcataataatcccagaaggataaatggtgtatccatcatatcaagtatttatccattctttgttttataaacaatttaattctacctttttagttattttaaaatgtacgataaattaatgttgactatcgtcaccctgttgtgctatcaaatactagattctattcattgcatctaactactttttgtacctattaaccaccccctgtccccactatccttcccagcctctgataaccttcattttactctctatcttcatgagttcaattgttttgatgtttagctctacaaataagtgagaacatgcaaagtttgtctttctatgcctgtcttatttcacttaacataacatcctccagttccatctgtgttgttgcaaatgacaggatctcattcctttttatggcttaatagtactctattgtgcatatgcaccacattttgtttattcatttgtttgttgatggacacttaggttgtttccaaatcttggctattgtgaatagtgctgcaacgaacatgggagtgcatttatctcttcagtatacttcttttggggtatatacctggccacttagtgtcacttgtgccatagtcactggctataccatattcaaacataaatataaatctcacctcttgatggaaaaatgtcattatcattttgtaaggaaaatgtatagatggaaagatgttattgtggtcatccaaaatacaatctgtcacagtctgtgatagctaacctgctaaattcatcttcagtctcaattttccattaaaagaaaagaaatgattttgagtgacactagctcccagtgtcagcaatttaaaaattaaaatgaacttgatgatgcttccctgagaatgccagaagtagtaaattaagaagtaaacttttcaagagaaaaaactgtcctggatctaaaagagtaggaatacagacaacaatactccctatgccagaataatttagcatgcttactctgttagattttactgagtccttacttagcagacaaaggatgaggtttattactttttgatgaatgagagttgagttagagaagctctgggtgaatatttcatctcactagacggtttgggacattaaattttgggcattaaattatgtccccatctcctcccgaaattcaaatgctgaagctctaactcctagtagcttagtgactgtatttggatataggccctttaaagtgatgtatttggatataggccctttaaagtgatgattaaagtaaaatgatgctgttatgatgggccccaattcagtattactgatgtccttataaaaataggaaatttggacatgctgagagacacttgagatgtgtttacacagagtggagggccaccatgtgaggaggaagcaagagggtgagcatctctctcacctataaggagagagacttcaaaagaagccaaccctgctgcaaccttgattttggacttccagcctccagaactgtgagaaaatacatttctactgtttaagccacccagtctgtgatattttgttatggcagccctagtaaaagtatacaccatttttaaagtaaggataataaaaccttcttctgacgatggaatcagacatttaaaaaacatcacactgtgcctgccattttataggtagcagatgaagaaatcaccctttctgtaataagattgtgctacatatcagtcagtagagaaaggtgaaggctcaacaaatatggaggccctttaatagtcttgtaatattttacttctctggatgttacatgatctctgtatagttccttaatattttattagataaacactgtgacccctttttgaagtcacctaacttacgtctacattcccctttcttgccgaatatcactaggtcccttctcccctacctgtcatgagggcttacttcctaacctgatgatcacagagcagttcttgaaaggagtcttgagataccttcaagtacaaaagagaacttgttattttgatgtattaaaaaactgagacgtgatagtctccaggtgccatctgataagcactccccctcatccattcctatctgccatgtagttcttagtaaatgacaaagtcttattttaaaatgtgactgtgtttatttcccactgagtacccaatgaaaggaagatcacccctatttacccttaccatgaattaaaagcaaaaacaaaatcactggattcctccacaggccatgtaagaatcatgttatcaaagctactttggtgccacatcgaaaaatggcagctgagaatccaaggaaatattgattttaccagcagaaaagggtctgtgaaaattaaaaagaatattgtttattggagagaaatataaaataataaaataggaggctctaaagctatgtgtacacatgaaatgttgaagatagaaccaaagatgcacttgtgggttagtaaagagttcttccctttacttctgaggctcgcccagttctacagaagtccttgagtcctcggtactgttcagtagtttgggaagcaaaactgaaccctatgcagtcaagatctggttcaagatagtatgtgcttttgaactggtatgagtcactaactggtgctgagtcttaagggaactcagagaaaaaggtaagttcttgatcactgtaaggttgaatacacatttatggggtggaacagaccagaccattgtgaagtattgccccatagactattcctgaataggtctcatctggtagcctgaacaatagatatttgtctttcctattcaggagataatttgaacatgctttgtgatcattctcagcagattcacttgatttgtgagcaaactgatgaaagtgataatccacagacctaattctacattttaagagataaaagataaaactcttcaagcgaggatattagaaatcaagctgtctgccaaagattaatattcccttccacagaatggagccgctgtgttgctgggaagcagctgcccatcaggaattacatttctctagctcccttcatttaagtgggaccatgtgacagagagctggccaagagaatgcaggcagaagtgatgcacaccacatacaggcctggcccaggggaaactttcatgcagtcttccactgtctttcccatctgctggctagatatcaacactgaggctgacttcggaagccatgtgttgaatcctgcaaggtctctgtatgaacccctgtgtccaggtcccatcatttggactttacataagcaaggaaaatatttgctattatgataaaccactacaattttggggatgtgtctgttcccacagctgatatttatcttaactaatatggacagagacataggaaaaaagaagttccccaaatatattttgtttccatatgcttttgtgtaccctcttctgcacttcctccccctctttgattcttacacatccttcaagaccaaggtcaggcatcacctcctccaagaagactttgaaacctccccaagctgagttaaatatggatactgcatgaaggattgtaatcttctgtgtatgtgatcatgtcccaatatctaacaacctaactggtacatatttgtaaaattaatatgtaaattaataaaataaatggagaaaggtaaatacttcaagcaaaaaataaaaagtacaagtcatcctgaaaatatgaaaggaaaagtctctactggctgtggacaatgtaattgcattaaatatttaaaaatatctaggtatgactagcctttctgctgcttcatatgatcttgtattaacctaaattattgcacccaaaatgtagcatatggcacttggtacaaatctgactctttcactagattgcgaatcccctgaagacaaagactgtggttttctttgtgtttccattttcaggtcccagaatggtgcctgaaatggtgtaggccctcaccacatgcccattcactgactcgttgactcactgactggctccaggctggccttgaattcctgggctcagactatcctcctgcctttgtccttttgttctgagtcttcctcagcattttctgccaacccttcttttcaggctgacatgggttaggaggtaatctgaaagctttcaccaataagaaaaattaattgaattacatcagctctattataaggaaaagggctattgagatataatctacatactgtaaaattcatctgtttaaagtatacaattcaatgatttttagtgtacttagagaattgtacagccactcccataatctaattgtagaagatttccatcatccaaaaaagaaaccttgcagcagtcactcctcattcacactcttcccacccccagccctaggcaaccactaatccagtttctctctctatagatttgcctattctagacacttcatataaatggaagcatgcaatctgtggggtggggtggggggaggttgtagaagctttatcttttgacaaatgctgattagccttgtaaagtgcagttgaatattatcaaacatgttctcaaaatgaacaaatataggaataagatgggggtttctataactgtctaaattactgagaaataataattaggggttgggcatggtggctcatgcctgtaatcctagcactttgggaggccaaggtgggtggatcacttgaacccaggagttcaggaccagcctaggcaacatggtgaaaccccatctctaaaaaaattagctgggcatgtggtgcatgcctatagtcccagctacctgggaagatgaggtcggaggatcacctgagcctgggaggttgagggttcagtgagttgtgatcgcacaactgcactccagcctaggtgacatgagtgagaccctgtctcaaaaaaataaaaataaaataaataataattaaaggaaccagcagctcaaaatatattataaacaattctcataattgatattttatccaaatatcaaaaattcatacatttttcagatgaagggtctccagagaaacagaaccaatagagtctgtgtgtgtgtgtgtatgtgtgtgtgtgtacgtgcatgtgtgtgtgtgagagagagagagaaagagaaagagagattgttataaaattttataacaaacactaacatcgaggaatgctagtgagtagacatgcagctatatggtttggcagggcctgccagtgctcaccataaatgtcttctccttgtcttgctggatacataatctgactctcttcctcaactgtcctttataggtaggtgaccatattagttagttctggacaatggaatataagcacaatttatgtaagcacaagttatgtgttttacttctgggctgccatggtacattttatgttaacctgatggggccacagagtgctctggtttttggccaaacattattctaggtggatctgtgagggtgtttctggatgggactaacatttgaactggtagactgagtacagtagattgccctctctaatatgggtagggcaatcagttgaagactaactagaacaaaaaggccgagtgaaaaggaattcccattacctgactgcctttgggctaagatgttgttttcttttctgctttcagacttggatggcaacatcagctctcctgggtctccagcttgctgactgcagatcttaggatatgtcagcctccgtaatagcatgagccaattccttataataaatctctctctctctctctctctctctgtctgtctctctctctctctcacacacacacacatgcacgtacacacacacacgtgcgcacatacacacacacacacacactctctctctctctcgctattggttctgtttctctggagacccttgactaacacatgagcctaaaccataaccccttccacagagaatccttgctctcttctctcatctacttactgaatggatggagaggatgctatgaacctagggaaaggtggggccacaaaatggtaggcatctggggtccctgaataaagcataagaagagagctgcctagtctaccttcattgtactgcaacatgaatgagaaataaacacttattgtgctgatccactcagagtatgcggtttatgtattatggcagctagtggtatttactgtagcatttattacatgctagatttttatgaaattgaagggtaattcactcaagtcaaaatgtaactaaaaattaactgtttcagtggaatgaatacctctttgcttgtgaattttcaaaattaaaagagaaaagtctgagtcatgaactgatagtagaggggtgctttaccatgaccagtgttctggctcacatgaagccatggagtctagcccaagtagctgaattcagtggcaatgttcagatctgactcatccagtctggctcttcttaagagacaaagaacaaatactgtctgttggcgggtacttccaaaataattagcaagcaccagcatacttttattatttttttctggctatacaaacgcccataactagtatatcaaacttcatgactgtgaaaaaataaaagaacttgtgaaaagtaagaaacattttgccaggaagcaatttcattaatagagaagtagaattgtatactaggaggaacatgggctttgaaagtaggctgtcataggtttaattcattcatcactattaattaattcatcaattaaacaagtgtgtactgagaacctactaaattgaaccataaagatgctgatactcaactttatttgaactacaaaaataatggttttgtatgattcagtctaatacataacagccactgttgtatgtgctgggccttcagtaagaataaaacaaagttcctgttctcatggagattaccttttagtggtgagagatcaaaagaaaacaagtcaaatgtatagtatgtgcagtaataatacaggcaattaagaaaaatatagaaggtaaggaagatgggtgtgttgtgaggggaggaatttgctattttgtggtagtcaggaaagcatctttgataaagccatgtttgagtagagaactgtaggaagtgcagaaataagccatttggctacctgggagaagagcattctaggcagaggaaatagcaggtgcgaagtccctgatgcatgactatgcttggtatgttcaagaatagcaatgccagtgtggctggagcaaagtgggcaaaagagagagtagtaagggatgagatcagcaaggcataggactacctcatgtaaaccttgccttacttttatagggcttctggttttcactgatttaagagttgaaaaaccttggagggtttgggggagagatgtgacatgtgttttcaaaagactactctggctactcttgtgcgaatagactgtagggaagagaaggtcgaagcaggccaattaaaaggctattattcccctaatccaggcaggaaaagaccatggcttggtctaaaacattaggtatgcagctagtgagaagtggttagcttttgttctatgaacgtagaactaacaagatttactgatgtatcggatgtgccatatcaaaaaaaagaggtgctaaaaatgttctgagcaagtgaaaaggatggagttttcattaactgacatggggaaacctgaacaaggaagaggttttatggctgtgagaatttagagtttcgttttagacatttaaagggtgaaatgcctactagacattcaaatggagaggtcaaatagtcaagtaggcagctgaatacaacagctgcagagagactcaggttaggaatataaactttggagtcatcagcatgaataagacaataaactattgaggttaattgagaaaaaaagaaaagaaatagcggagacaagaactaagcctggagcattctgacgtttaggggtcaaagaaaagagaataaaaggaagcagctggggatgtcagaagagatgtttagaatgcaagtcttcattcttatgagacctctccaggtttcagtttccataagtgaaaaatacagaaaataattcctaggtcagaggatttccaaaggctgaaaagaagtaacatgggaaagcatacataagatctagaatgtgcttaataaatgttattcctgactcttggtgaaattctgggtagatgccagatttctcatgcttccttctattttttggctcctcaatcaggtcctcaaatatgaaccctatagtccaacagtgttggctatggaagtaagagcctcattattcttcagttattagttatacatttttcagtgatagagctcactgttatcagatattcatctttactgtttgttctcttcctgtgttttgtgaggagtcaggtttaaaggagagtggtcactaatgtgaagctgggaaaatggagggaggatgagttctttatcacctggcaggagtgtatccttacttcaacatttaactgctcaccaaataatttaatttcagaggatttgtttcagtgctatggaagaactatctgtatataaatagctgggttaagtagatctttcactgcagctgttaaaacctattgttgtagctagacaccttgtagtgattcaagatcatctgtctttgaagaaagtctatgctttcttttatgcacatgtagtttcttttagttctgaaaataaaataagctttacttaggaagactaaagaaaatgtttactgaataaaccaggggtagctgaaataataccctgccacaatctcctgcttttatttcatttatctgctttcaacatttaccactgaatacttattgaaagaataaaggaaaaactaaatgaatggatgaattaatatctgaatggcttttttttgcttttccttaacaagactcctcctaaataatcctaaataagttctgggttaccctgaggattatcttttacaacaagaatcatgaagtaggaatactttttcataaagaagagataaatcccagagtaacaccgaaacttacctagtaaagtagtaaacaatctgtagggaatctcaggggatcatctgatcctagtatcaggctcaagcagattctttttcaagttcttatccctcctcctcttccccaccccaacccagttggatttaaattgtgtatattagagcctctttgtaaggaagaattgggcagcagtgcagagagaaggaagagttgggtgctttaccctactgctagcacttgggtgctcaaagtagagaaacaagaaaaacaggctactggtaagatggacaataaaatgagctgcattgggtgaactgtgacctagattataacagtgctttacaaataatattccaaattataagtccctaaaattatccaaatctagattttaacaatcccgaaagccattcattttagaaagattttattttcctgtatccttccctccatttctactcctgccaccttagtccaaaccagtgttttttttcttgccaggacaatgacaaaagcttttcaaccagtctcttcattgcttctgttgctcttctgtaatccattctccatgtagcacttggaataatccgactaaaatgtaaatcaaatcaaatcatttctctacttacaatctttcaatggctccctatagtacttggaacaacgtccaagctcctccctgtggtctttaaggttttttgtgatccggcccctccctgcccctctaacatcatattgagtcattctctccttcactattctccagctacattgacatccttttacatgtatggtgcttgtgtatgtttgtacatatctatatagtgtatatacatataactattttttattaggatataattggcatacaataaactaaacacacttaaagtgtataacttaaagttttcagatttagatatatgcatgaaaatataaccacaatcaacaaaattggcatatctatcatccaaaaatttccttttacccttttgtaatttctcactcatgtccctcattatcttctcatccaccaggcaacaaacaatatgctttctgtcactataggtaagtttagcttttctagaattttatctaaatgaaattatacagtatatacttttttgtctagctgcctttactcagcatagttattttgatatttatccatgttgtttatattaatagttcattcctttttattgccaaatagtgttccattgtatggatatagcataatttatttatccattcacctactgatgaacatttggtttgctgccaggttttgtctattagaaataaagctactatggacatttgtataaaactcattctatcgccatttgttttcatttctcttcaaaaaatatctaggtataaatgaccgagtctagagaaggtgaagcaaaatgactgaatagaactttccagcaattgttgcccctgcagaataccaaattgaataaccatccacataagaaaacaccttcataagaaccaaaaaccaggtgagtgatcatagtacctggttttaacatcataccaatgaaagaagcactgaaagagtatgaaagatgttggcgccacccctccctcatcccctggcagtgactgtgtggcatggagagagaatctgtgtgcttgggggaggaagagagcagtaattgtgggactttgcactgaaattcagtgctgtgctgtcataacagggactaacacagggcagaactcagctggcacccaaagagtgagcatttagaccagccttagccagaggggaatcacctagcagtattgtcagaattctgacaagcccaaaaacaagctaaagcgctctggagttctaaataaacttgaaagatggtctaggccacaagaattgcaatttgtgggcaagttctgatgctgttctaggctcagagtcagtgaatttggggtgcatacaacctagtgagatgccaaccacaggggcaagggaatgtttgtgccacccctcagccaactccaggcagcacagcttgcagctccaggattcacaccttccttctgcttgagaagaagagaggggagaggaggacttcgtttttcaacttggataccagctaagccacagtaggacagggcaccagggagagtctgacagccctcattccaggtcctggttcctggacaaaatttctaaatatatcctgagccagaagataacctgcttccttgaagggaaggacccagtcctggcagaattcatcacctgccagctaaatagcccttgggccttgaatgaacatgagcaatacccaggcagtacttgtcataggccttgggtaagacccagggccacactggctttatgtgtgactgagtgcattcccagcagctgtggccttgaggagagaatcctgtttgaggaaaggagagggaagagtaaaggggactttgccttgtagtttgggtatcagcttagccacagtggagtagaacatcaagcagtttccaagggtccccagttccaggccttggttcttagatggcatttctggatccatcctgggccagagtgaagactactgttccgaagggagagatccaggcctggcagcattcaccacaagctgactgaagagtccttgggcctggagcaaacatcagcagtaaccaggcaatcctcactgtgagcctagaacagtggtggccacagcgagagacttcttctgcatagaggaaagagtgggaagaatgttgtcttgtggtttgggtgccagctcagccacagtagaatagagtaccaagtagattcttacgtttcctaactctagacctgggctcctaaatggcatttcttgtcccactctgggccaggggggagctcaccaccctgaagggaagggcataaacctggctacatttgctgcctgctgactgaagagcctttgagtcttgagtgagcatcggtggtagccaggcagtggacacctcaggacattgacaagacccagtgttatgctggcttcaggtctgacacagtacagtcccagtgatggtgaccataggggtgcttgtgtcaccccctctgacagctccagggagcccagcatgcagagagagactccatttgtttggaggaaagcgagagaagagaacaaatctctgcctagtaatctaaggaattcccctggatctcacctaagaccaggaaggtggtatttctacaagtctgtaagagtcccagtgttactgagcatggagtgccccctaatgcagatattgcaacagtgactaaagatttagatcataacacttgaatacttggaaagccttcccaagaaggatgggtacaaataagctcagactgcaaagactacaataaatacctaactcttcaatgcacaaaaataaatgaacacccacaagcattaagaccattcaggaaaacatgacctcacaagacaaactaaataaggcaccagtgaccaatcctgagtaagagatatgtgacctttcagagaattcaaaatacctgtttttaggaagcttaacaaaatttaagataacacagagaaggaattcagaatcttatcagataaatttttaacaaagatattgaaataatttttaaaaatcaagcagaaattctggagctgaaaaattcaattgatgtacaaagaatgcagcagcatcttgcaatagcagagttgatcaaacagaagaaagaattactgagcttgaagacaggctatttgaaaacacagagtcatagaagacaaaagaaaaaagaataagaaagaatgaagaatgcccataagatgtagaaaatagcttcaaaatagcaaatctaaaagttcttaatctttaagaggaggtaaagagagagatcagggttgaaagtttattcaaagggatagtaaaagaaaattttccaaatctaaataaagaaatcaacttacaagaacaagaaggttctataacaccaagcaaatttaacccaaagaagactactttaagtcttttaataatcaaactcccaaaggtcaagtataaagaaagaaacttaagagtagcaagagaaaagaaacacatagcatacaaaagaacttcaatatgtctggcagcagaattctcagtggaagccttccaggccaggagagagcggcatgatatatttaaaaggatgactgaaaatgcttttatcctagaataacataggtgaaaatatccttcaaacatgaaggagaaataaagatcttcccaggcaaacaaaaggtgaaagatttaaccaacatcatatctgtcctacaagaaatgctaaggagagttcttcaatctgaaagaaaataatgttaatgagcaataagaaaacatctgaacatacaaaactcactggtcataataaataaacagacaaacacgtaatattagaacactgtaactgtggtgtttaaagcacccatatcttgagtaggaagactaaaagatgaaccaatcaaaaataataatggggtgataaagttaaagtgtatagagttattagttttctctttgcttgtttgttaatttgtttttgcagtcagggttaagttgtcatcagtttaatgtaatgggttataagatgttatttgcaagcctcctgataacctcaaatcataaaaaaccctacaacaggtataaaaataacaagaaattaagatatacctcctgagaaaaccaccttcactaaatagacaaagggaggaagaaaggaagagaagaccacaaaacaaccagaaaacaaataacaaaatggtggtagtaagtccttacttatcaataccactgaatgtaaatggactgaactttccaatcaaaagacatagagtggctgaatggatgaaaaagcaagacccattgatccgctacaagaaaaacatttcacctataaaaacatttcacctataaaaactcatcgagactgaaaatgaaaagatataaaagatatttcatgcaaatgaaagccaaaaaaagggcaggagtagctgtgctcatatgagacaaaataagtttcaagataaaaactacaaaaagtgataaaagggttattatataacaataaaggtgtcaattcagtaagagaatataacaattgtaaatatatatgctcccaacactggaggatcagatatgtaaagcaaatattatcagagctaaagagagagacagatcccaatacaataacagctggaggcatcgatgcctcactttcaacattggacagatcatccagacagaaaaatcaacaaagaaatatcatagttaatctatactatagaacaaatggacatcatagatatgtacaaaacatttcatccaatggctgcagaatacacattcttctcctcagcacgtggatcattctcaagtatagatgatatgttaggtcacaaaagaagtcttaaagaattaaaaaatattgaaatcatatcaagtctcttctctgaccacaatggaatgaaactagaaatcaataacaagaagaatgttagaaactatacaaacacatggaaattaaacaatatgcttctgaatgaccagtgaattaataaagacattaaaataaaattttcaaaaattattgaaacaaatgaaaatggaaacacaacatatcaaaatctatgggttatagtaaaagcagtactagagaaaagtttctagcaataagttcctacatcaaaaaagtagaaaaactttatataaactacttaattatgcattttaaagaactagaaaagctgaaaagctagaacaaaacaaacacaaaattactagaagaaagcaataataaagattagagcagaaatataacagaaacagaaaagaataatacaaaacgtcaatgaaatgaaaagttggttttttgaaaagataaacaaaaatgaaaacttttagccagactaagaaaaaaactaaaaaggcctaaatacaatcagaggtgaaaaaggagatactacaactgatactccagaaattcaaatgatcgttagagaattctatgagcaactctatgccaataaattgaaaaatctagaagaaatggataaatgattatacacagacaacctaccaagattgaaggctgaagaaatccaaaacctgaatagactagtaacaagtaattagatcaaagccatactaaaaagtctcccagaaaaaaaaaaaaaaaaggcgtggacctgatggcttcactgctaaattctaccaaatatttgcagaagaactaataccaatcctactcaaacaattctgaaaaataaggggactacctctaaactcattctatgaagccagtattatgctgatatcataaacaaagacacatcacaaaaagaaaactacaggccattatccctgatgaacattgatgccattgatacaaaaatcctcaacaaaataagagcagtccaaattcagcaacacattaaaaaggtcattaatcatgaccaggttggatttatccctggaatgcaaggatggtttaacatacacaaatcaattaatgtgatatatcatatcaacagaataaagggaaaaaaacataaaatcacttcaatagatgctgaaaaagcatttgataaaattcaatattccttcataataaaaactctcaaaaaactggggatagaagaaacatactttaacataataaaagctatatatgacagactcacagctagtataatacttaatggggtaaaactgaaaactcttcagttttgaagatctggaacaagacaaggatgtcctctttcaccactgttattcaatataatactggaagtcctagtagagtaatcagacaacagaaagaaataaaaggcattcaaatgggaaaggaagaagtcaatttatccttgtttacagatgataaaatcttatatgtggaaaaacccaaactaattcagtaaagtggcaagatacaaaaccaacatacaataatcaatagcatttctatatgccaacagcaaacaatatgaaaaagaaatcaaatcccatttccaatagttatgaataaaataaaatacttaggaatagacttaaagaagtgaaagatatctaaaataaaaactgtaaaacactgatgcaagaacttgattgaagaggacacacaaaaaaatggaaatatattccatgttcagggattggaagaatcaatattgttacaataaaatgctcatactaaccaaagctatgtgcagattcaatgcaatccctatcaaatatcaatgacattctttgcagaaatagaaaaaaaatttcctaaaattatatggaaccacaaaagaactaggctagccaaagccatacagagcaaaacaaacaaaactggaggaatcacattaccagacttcaaattatactacagaaatattgtaacaaaaacagcatggttctagcataaaaacaggcacatagaccaatggaacagaacagagaacccagaaataaattcacacatgtacagtgaacttatttttgacaaaagtgccaagaaaacacattggggaaaggacaatctcttcaataaatggttctgggaaaactggatatccttatgcagaagaacaaaactagaacctatctctcaccttataaaaaatcacactacctgacttcaaactatactacaaggctacagtaaccaaaacagcatggtactggtaccaaaacagatatatagaccaatggaacagaacagaagcctcaaaaataacaccacacatctacagccatcttatctttgacaaacctgacaaaaacaagaaatggggaaggattccctgtttaacaaatggtgctgggaaaactggctaggcatatgtagaaagctgaaactggatcccttctttacaccttatacaaaaattaattcaagatggattaaagacttaaatgatagacctaaaaccataaaaaccctagaagaaaacctaggcaatatgattcaggacataggcatgggcaaggacttcatgactaaaataccaaaagcaatggtaacaaagccaaagtagacaaatgggatctaattaaactaaagagcttctgcacggcaaaagaaactaccatcagattggctgggcatggtggctcacgcctgtaatcccagcactttgggagggcaagatgggcagatcacgaggtcaagagaccgagactattctggctaacacagtgaaccccatctctactaaaaataaaaataaaaataaaaataaaaataaaaataaaaataaattagccaggtgtggtggtgggtgcctgtagtcccagctactcaggaggctggggcaggaatgaacctgggaggcggagctttcagtgagccaaaatcacgccactgcactccagcctgggcgacagagcaagactccatctcaaaaaaaaaaaaacgaaacaaaacaactaccatcagagtgagcaggcaacctacagaatgggagaaaattttcacaatctacccatctgacaaagggctaatatccagaatctacaaagaactccaacaaatttacaagaaaaaaaagaaactaccccatcaaaaagtgggcaaaatatgtgaacagacacttctcaaaagaaaacatctatccagccaacagacacaaggaaaaatgctcatcatcactgggtatcagagaaatgcaaatcaaaaccacaatgagataccatctcacaccagttagaatggcaatcattaaaaagtcaggaaacaacagatgctggagaggatgtggagaaataggaatgcttttacactgttggtgggagtgtaaattagttcaaccattgtggaagacagcgtggcgattcctcaaggatctagaactagaaataccatttgacccagcaatcccattactggatatatacccaaaggattacaaatcatgctactataaagacacatgcacacatatgtttactgcagtagtattcacaatagtaaagacttggaaccaaccccaatgtccatcaatgatagactggattaagaaaatatggcacatatacaccatggaatactatgcagccataaaaaagggtgagttcatgtcctttgcagggacatggatgaagctggaaactatcattctgagcaaactatcacaaggacagaaaaccaaacaccacatgttctcactcataggtgggaattgaacaacgagaacacctggacacagggtggggaacatcacacactggggcctgtcggggggtgggggctggggaagggatagcattaggagaaatacctaatataaattacaagttgatgggtgcagcaaaccagcatggcacacgtatacctatgtagcaaacctgctcgttgtgcacatgtaccctagaacttaaagcataataaaaaataaaataaaataaatcaaatcaaaatggattaaagacttaaatctaagatttcaagctatgaaactactaaaagaaaatggggaaactctccaggacattggactgggtaaaagtttcttgagtaatatcccatgtgcacaggcaagcaaagtgaaaatggacaaatgggatcacatcaagttaaaaagcttctgcaaagcaatggaaacaattaccaaagtgaagaggcatcctacagaatggaatacaatatttgcaaactattcatctgacaaggaattaataaccaaaatatataaggagctcaaacgactctataggatagaaacctaatactctgatttaaaaatgggcaaaatatctgaatagacatttatcaaaagaagacatacaaacagcaagcgagtatgtgaaaagatactcaacaacactgatcatcagagaaatgcagatcaaaactacaatgagatagcatctcaccccagtttaaatgatgtttatccaaaaatacgagtaataatgaatgccagcaaggatgtggagaaaagggaaccctcgtaaactgtttgctggaatgcaaatttgtacaggactatggagaaaaatatgtaggttactaaaaaactacaaatagaaccaccatatgttccagcaatcccagtgctagttatatacccaaatgaaatgaaataggtatataagacagatatctgcactcctacatttattgcagcactgtttacaatggccaaaatttggaagcaaccttttgtccatcaacagataaatggataaagaaaatgtggtatatacacataatgtagtactattcagccataaaaaagaatgtgatcctgtcatttgcaacaacatggatggaactggaggacatcatgttaagtgaaataagccaggtacagaaagattaacttcacatgttctcacttatttgtgggagctaaaatttagaacaattgaatccacggagacagagaatagaatgatggttaccagaggctgggaagagtagtgggggcaggaggagaaatggggatggttagcggatacaaaaatacagttataaacaataattaacatttagtaattgataacataacagggtgactacagtcaacaataaattattgcacttcttttttttttgagacaaagtttcgctcctgctgccgaggctggagtgcaatggcgcgatcttggctcaccacaatccccgccttccaggttcaagcaattctcctgcttcggtctcccaagtagctgggactacaggcatgtgccaccacgcccggctaattttgtatttttagtagagacggggtttctccttgttggtcaggctggtctcaatctcctgatttcaggtgatctgcccacctcagcttcccaaagaattattgcacattttaaaataactaaaagaatataattggaaggtttgtaacacaaagaaataataaatgcttgaggggatagatagcccatttaccctgataattacacattgtatgcctggatcaaagtatctcatctaccccataaatacatacatgcactacgtacccataaaaaaattggctgagtcatgtggtaggtagatgtttaacatttaaaaatacagccaaaccattttccaaagtgattataccattttatattcctaccagcaatgtatgagagttccagttactccacatgttcactaacacttggtatgatcagctgttaattttaaattttgtaacaggtaaatattagcccaatggctaatgataggaagtattttttttcacatgctgatttgtcatctgaatatctgcatatcttctatggataggtgtccattaaatcttttgctcatttaaaaaaattgtcatttgtttccttattactggatttgacagttcttcacattttccatattaactcctttataagatatgataattggaaacatattctcccagtcagtggtttgtcatcactgtctttgcaatgtttttcagaaagctgaagttcttaattttgattaagttcaatatatcaaatttttcttttatggattatactttcagtgtcattcttttaaagttttattttaagtccaggggtacatgttcaggtttgttatataggtatacttgcgtcatgggggtttgttgtacagattacttcacacccaggtgttaagcctggtacacattagttatttttcctgatcctcttcctcctcccaccctccaccctccaaaaggccccagtgtgtactgttcccctctatgagtcgtgtattctcataatttagctcccacttataagtgagtacatgtggtattcagttttctgttcctgtgttagtttgctaaggtgtcatttttaagaaatctttgcctaacccaaagtcacaaagtgtttctcttatgttttctgctagcaattttagagttttcggctttatatttatctttgcaaaatatttaatttttaatatggtataaggtatagatgagtgcttttatccttttttttgaaaaccatatccaatttttccagaaaatttgtggaaaagactttcctttattcattgagtcaaacctttgttaaaaatcaattaaccatataaatgtggatctgtttctggactctgtattttgtttcattgatctatttatttttacattgataccacatggtcttaaatatcatgactttatactatatcttgaagtcagttggtgtgtcttacagctttaattttcttcaaagttgtttttaaattattctgcatttccatatgaatgtgaggatcagtttgctaatttctacaaaagcctgctgggattttgattgggttggcatcttttctggtcttttaaaattaaaagcttatcatcactttaagacttttgtattttgttcattggttcatttatcttcttttctctttacagggatctttcgatggctggctcctttgtatcattcgtatttcagctcaaaagtaacatcctcagagatatctttccttgattacccaatttaaatttatatccctcatctctttatatcaaagcattgttttgttgacttaacagcattaattatcatcagaaattaatcttgcctatttgtttattttgttgcttattatctgtctagccaactagaatgtgagaaaagagtagagaccttgcttgtcttattcagtttgtatccctgaagccaaaaagtgcctttgataagcggatactaaatatttgtcgaatgattgactatttgacaaatgtgcatttaagtaaagattcaactagtatgaaaatatataatattaactagaatatgttaacttatttatgaaatgatagttctctgggaagactgtgggaacttgactgtgacttaaagctgtagttctcttgaagattatgaattgcgttgggctagattatggcatttcagaaacatagatttttggtttttaaactaaacatctcaatttagctcattagctttgttagcagaatttaaataggtctcacattagagttattcctgattactttaggaatgtgaatatctagaacaaataaaatctttccccaaacattacacagataaaaggcagaaagtttcaggtccatgagaaattataggtatttcctaaataatatttaattaaaaataaatactagtcataattttgacagacagaggcagcaattaaaacatacttcatttttgtccttgattgcttaaagtagcaaacaatgaaatcaatttcttgagccctatccatgttgcaaaggtataaataagattttatccttaatgagatcatacaacacagatacaaaacctaaggctgtttcaaaatgttttgtagtagcgtaaacatagaattttatttgctgagctatttctctcactgagaaccttcattcattgaacccaccaaacttgtgttgagcaccagctacatgttaggaactgtgctaggcaatggagataagaaatgaataaaacagagtctcaatccttcaagaagtcacagattttacaatttcaattgcttgaaggaaaagtcacaactgaagagactggaaattgtggaaatggtcagctttttttccctgattttgttctactgtggtccttacgtggccttcattcaatacctaggcttcatggtgggcttagctttccccttccaagtgactcacaggcaactccagatctagtgttctattattagccttctcaaacctgattattctaagaagcacttcccactggcaacatggtaatcatgtttaaatataactcttcatgatcaatctaaatctccagatttttaaccaagtttccctgtggcttagataccttttttttttgctttgtttttaattaatccacgtttttataatcctatgtgacattaacatgtaaggggtgtgtgtgtctgtacgtgtggccttctgcactaaggcattagacagaaacaatttgaatgaagaccactggctcttctagtcaaacttcctctttctgtatactctgcctgtatctgtcatctgtctatacctgtcagatgtctgtacatgtcaggaataaagctaacgggatgtataacaactaataattcatggtttgaataactatagtagctttcatttattgaatgtttcctacgtaccaatgatatgggctggctgtgtccccacccaaatctcacgttgaattgtaataatccccacgtgtcaagggcagggccatgtgtagataattgaatcatgggggtggtttcccccatactgttctcatagtagtgaacaagtctcatgagatctgatggttttataaatgggagttccccaacacatgtcctcttgtctgccaccatgtaagatgtatcttgcttcccctttgccttctgccatgattgtgaggcctccctagccatttggaactgtgagtccattaaacctctttcatttataaattacccagtcttgggtatgtctttattagcagtgtgagaacagactaatacaaccaggaaccaggaaatatgcatgtccttactttatttttgtatcaatcctatgaggtagggacttttattttcttcattttatcaataaagctcaggtagggtaatttggcctagattacatcagtaagtgaagagaacaaggtttcagcttaatcctgtcaatctggccatagcctatatacttaggctatacaaatattaaagtatactattaagttacaaaatattaatattaaaaactaagaatggtttctatatcctctacaacccaattttccaatctttcagtaaccagggcaatgagactgaaattgttcattttctgtttttatagacatttctgttttttaaaacaagttgttagcatcaaatttcggtctctgtgaatctggaaacacaaggctatagctgacctgtcagttattatattatttgtttttgcaattttggccacaggccatttatcctatttcatgtttgttgctttttttttttttgagatagatagggtctcactctgtcacccagactggaatgtcatggcacgatcatagctcactgcagctttgaactcctgggctctagtaatcctcccacttcagcccttcaagtagctgggattacaggtgtgcgctaccatgcctggctaagttttctattttttgtagagacgaggtctcgctatgttgtccaggctggtcttgaactcctggcctgaagcaattcttctgccttagcctccaaagcactggaattataggtgttagccactgcacccagccttgtagcttctgaagagcaggaaggagagcttgtgagttaatatgaaacattaagatgtcaatatcatgaaataaaggcatacttttcatagcaaacctttccataaattactcttacgctttttctttctttattcctcttgaactgtaataaaaatgaaaactataacaaatataatcacttttaaatgtttcttagtcctaagcttctatcctgttgctttccagtaatgtgtttgtggttgctgttgtaactataacaccttaactttcaatgatctaattttcacagtaaacagttaccctattttccaaagatcacactctgacaatagaagttaggacatatctatatgcatacccatatttgggaaatagattaatcaactaacacagttttccaaataagtaattttttaaaaatccctttttttccattttgttaagccttttgtattttctttttgatattaggtattgacatgaccctgcctgcacagttccagtgataaacacttgctttaatgatttattgcctttcctggaaaggaacaatgaatgatctgaacttattgctgttcctatgcttggtgggcaaatcacattgagtttgccttcatggtcaatacagatggctgtaatcaaatcaattttgggacaagccacattgaatgctaaaagcctgatttgaatagcacagcctaaagatgatggaacctatgccactgccagctgattactatgctttagaaaaataaaaatgttttaattaattacggggatgacaaaaatctgtattaaaaggagtaaaattggaaatctaatcaagggtattaaaatccccaacgaattaggcctgaaggaaggatatctaaaagatgtaccaatgagttcatacagacctacagatacatctaatgaatggttgctaaataggacaaatatagctcattatcattttagaaggataattatagataattacaggtaaactatcatcccaatgctacatgtgatgtagatgacatgttatgctgggctttttgttttctctcacaacacttattgaatatccactaagtttagaacatcacagaagttcagatttgtaaataagaaaaaaaaaacaacacagaaaacatagaccaaagcccattataataaactccatggagcatctacatttttgcttgcagtacaattttgtttacatatttacaaatcactttcctatcaacagggaactagagactaataaaagggctcatgcccaactgttctggagaatttaagcaagtaaaatgttgtgttcaaaatgcagtaggggtaagaggtggataaaatgcatataacttcacttttgcttattctttctatggttcagccttgatctggtttggtgcacaaatgtgaaggtttagaggcatactttggctgtgcagtttaggtagtattttgatgcacatgtaaaggctagaaaaaaatttaaaagtgctatttggtgactagatgtattcggtttcagaactaataggctatatagagatataaaagaggatatttattatgggaattggctcacatgattatggaggctgagaagtcccatgaggtgccaccagcaagctggagaaccaggaaagctggtgtgtacttcagcctgagtccgaatctctgagaaccggggagccaatggtgtaagtccgagagtccaaaggcccaagaaccaggagctctgatgtccaagggcaggagaagatggatgtcccagctcaagaagagagcaaattagcccttccttcaccttttcattctatctgggctctcaacagattaagtgatgcccatccacactggtgagggcagattgtctttactcagtgtactgattcaaatgttaatctcttccaaaaggacccacatagacatacacagaaatgtttaccagctctctgggatctcttggccctgtcgagttgacataaaattaaccattacaccagaggaaaaaagaaaaaaactttgacaaactaagttatctttttaatacatgggtagaattaccactcacacagtaaagaaacaaagagctgttgaacagatataatgtattataatgcatttagtggaccattttagaatatagaaatggagtaaagggaaaaatctgtgatcaaaagaattttaccactcattcattcattcaaaatacatttatgtattaaatgtacataatagatttactcattcactggttcattcaaaaacattcagtatatgctatgaaccaggcactgagtgagccaatagacttggtttcccaaagtcagaaaaagatgaactcttaggaaaaaatacacaaaaatgaaaaacataaccataaaatcatcaggaaatagcaaaatttataaacataattacagctattaaataatacttgtataaaaaagtacacagtgttatataaaaaaaggcataaagcaacggtaaggcattggagagattggggtcaaatgaggttagtctttgaaaaggtcaaccaggagactgcatttaaaagcgggaaaaggatataatttgttcaagtgaagtgggaatggtgtatcaggaaggccaagcaattctaggtgggagaagtgtgtacagtagaaggttttcttagcagaaacacagaaaacaggtgtgggaaatatcaccagttcttaacttggcctgtctctctattaagaagagggtcacaaagtgttcacagatggagatattctctttccaatgggataacagtactgatttagttcatatgaaaagattttttacatgaaaatcatattttttggaataaatgatgtgcaattatgtacatgacaaaagaattgatttacaggggaattttgccgcagtgttatccaaacactaaattttttccatatatttaaaacatgatgctatttactaaaacatgctttatgcactctcctcccaggaacacatgcattacacaaaagaatgtatccatttgccttaaaacaaaacaacagtagcattaccatttcattttatttagctactaatgtcaagagagctcaatgaaaggaaatgttttttcagagttgaaaaaactctgattccccttgaaaatagtcatccaaggtcaatagagatcatgttattcagatttttagacaagaaacgaatgggggattcagatgacattgtgcttcagtgatatgttaggcacatgaattattatagtggcttgaaagagaaaaattcatctaagaatcttcctaattcccctttattcactgactttctcagtatcatctatcaaatatttcaaacaaaaaggaccacattgttaagtgacataaagaataaaatttggcagcacagatttggcttttcctctcttatgcaagtataaagttatgaatacaaacaaatttagttttcacttgcttttcatcatctaatcaataaaacacattctacataatccaaagcatactgaaagtagagatgacattaaaaagctgactataaaactaaatttcaaaagagcttaaaatctagtgccatgagaagtccagaagattagttattatgttctttaggctaattgagttcaaatgttggcttttatgaaatgtgcacaagggccacctcatgattaagtaatcttagcaaacgcacacaccggtcagaatagtcacatctgaacaaaaggcacataatacttatatgtggcaatacagcaacctctaagacagccatgtgattagaaatgtacacagcagtactgctgacctaaaaaattacatttgttacatggggaaggtgtatatattattggaagtcatggacttgccttacaaatctaaatttataaacacatcatagatgaaatgcaagtttggtcagtaaattggccatctgttccagatacttacttttctgtttcaaggagaaaaacagtctattctaaatattttcttagtcaacctcccatttgaggctctagtgaccaatcaatccatcaatcatttatgtatatctatctacttaaaacaaatatttattgaggttgtactatgccccaacactgttctaaactctggggtttcagtggtgaatcagaaaaggtgcctgtacacatcctagagaggtagacaaatttaaaaaaaatcaaacaataaatatttcagtattgataaattgtataaagaaaaataaggcaaagtagaagaacacagagactattttatcttattttatttttacgtatttcaatagttttgggggaacaggtggtgtttggttacatggataagttcttcagtggtgatttctgagattttggtgcacccattacccaaggagggtacactgtactcaatgtgtagtcttttatccctcacccacctcactcttccccacaagtccccagaattcattatatcattcttatgcatttgcatcttcatagcttagctcccacatataagtgagaacatatgatgtttgattttccattcctgagttacttcatttagaataatggtctccgactccatctaggttgctgagaatgccattatttcattcctttttatggccgagcagtattccatggtattctttatccactcattggctgatgggtatttaggttggttccatatttttgtgattgcgaattgtgctgctataaacatgcatgtgcaagtgtccttttcatataatgacttctttttcactagatagatacccagtagtgggattgctggatcaaatggtcgttctacttttagttctttaaggagtctccatactgttttcggtagtggttgtactagtttacattcccaccagcagtgtagaagtgttcccttttcaccacatccatgccaacatctattattttttgattttttaaaattatgaccattcttgcaggagactgttttaaatagagggacctgggagggtcttcttaacgcggtagttcacatttgagcagaaggttctcgttctctagtctattatattttcttataatttaaaattgtgcactctttgtgcagtgctgattcttggctttcctttcccccttctaccgttttcttttactagcttttgcctctcagagagcgtgagttaggaggtgaaactcatttatttgtgacaatgttgttcctgctgacagctttacaaagagttttgattgaaaagaaggctgaaaataagggataaaatgagatattcttggattctaatgatgcacattttctctgccaccctgaactcatatatcagtaaacaattgagaattgcctagctttctgagtgatctctgtttatcataggctctgggaatatgtctgatggtgatctcttataatacattaaataatatattttagtagtccattgtaatttgttcatctctgaatttggtaggaagtcatcctgatctttagcaatgaatgtgtactttgagattcccttgaattcataaaaaaaggttaatgtatccatattagtctgttttgcattgctatgaaggaatacctgagactgggtaatttataaggaaaagaggcttattggctcatggttttgcagactatacaggaatcatggcaccagcatttgcttccagtgaggcctcaggaagcttacaatcatagcagaaggccaagggcggtggggggcaggtgtatcacatggtgtgagagggagcaagagagagagagatgggggaggtcctaaattctttttaacaatcagttctcacatgaagtcattactgtggggagggtaccaagccattcatgagggatctacccccatgaacccaacacctcccaccaggccccatctccaacattggggaacacatttcaacatgagatttggaggggtcaaacatccaaactatatcagtacctattttacaaattgtatatttctgctgatatcaatttaaataaaattacattatttcataattatctgactcatgtcaggaattatcactaaattgatgacaaaagctttggacagtagaacaatctcaaaatattgtttccctagcataatgatgctgtctagcaataggatagaggattgtgggaatattttagctctgaaaaaagtggttctttacagttacaaggacagagaaaaactcaatatttctagaaaggaatataaagattcttactctcagaatccctggaaatacaaatataacaagaaatcttgtttcatcaaaattcttgtgaagttactgcagctaaaatcaggagtcaaataggggattctctctatacatagcaatggtcaagaaagcttgaataaccacagaaaggagcctagaatcaaagaagcccagggtaggaaggcatctttaaaatcacctggttctatacttcattaaaggcttgaatcatccagcaacttctctgccatacaatattcagactccagtaatggagaacccatttctttctaaagcagtgaactcctttaatggaaacctacataaatggtaaaatgtcctcccttgttgaactgaaatctattttttctttaacttccatttccataacagaaatttaactacactttgggggatgctttttactttcataaagcattttgactatgcacaagaatttgaactccaggggttttctggacctataatttagattttgggaggatatggtgggggcaaggcaggaagaaaagaaggtcttagtgttgtgcttcaatccagaaattcctgaagttcatcaccaacagttattggaggagttgttaataaagtaatttttaaatgttcactgttattgtttcttgtgtactgctccctcagcaacctcacaaggtgcaagtggggtaggggatgactgagaaggaagcattcagccattcctgggtctctagacccgatgccatcaaatactagtaaatctctgttgtaacccctagcaaagactttactaggcaggtttttccatcactgaacaagctgaatatttagaaagtgttttcttgtgtgtctccctacccccacccccataactttcaccactgaatcctttactagataagcaacacataagggtatttggagcccttcatgtaattgaatagggggatagtttctgatgatggttttacatgacagatggtttctagattatccaggtttttatcaactggatgctgtctagcatatcaaagacattttaaaacttttaaataaatatgtgctaagcaggtccaaagaggctaccacttctggtgatctggtcactgtccttttcccaatgcagtataattttatgagcactttgttaaagctgcatctctttgcaaaccagcttggttaaatttcctatttcattttcacatatctagtgttcattttcacatatctagtgatctgttcttatacagttgatttttttaacctcaaggaaggattttatatttatccttagtaaatttcattctaatggtttttatctagtgttatagcctctggagatcatgctgcatcttgattttgtcatcagtcagttaagccattactccactcccaggtttgtagcatccacaactttggaaagtacaatgtaatggtccttgtcgtccctggctctgccttcttctaacttttgcacttaaggtcaattaaaatgcatgaattcaaaatagtttttccttccaggatcaactctgcttattagactgaaggtggggacagaatgaatttagaatcattttattttagcacaggaaaaactgtataattgtgattgttggattcttcaggattgcatgatataatatttcaaatggcctctaatttctttaagtctcttttcagggaggaaaatccaggtttatatgcaaaaatgtagccagtatgcatatctgacaaaaactcgacaagtaggaatgaaagcagtgtagaccaaggaaaatggcttgacactggaatagagaaagggtgaataatctggagtcaaacaaaggtcccaagagagtgggtgaaactctccctgaatcttgagttcaaactatatataaaggtttgcaggaaaagaaacagaaaaaggcagtgaacaggcagtcctggagagcctggacaaagaaaaagattataataagagaaagacacttccttgtcattttatgggaaaatgagaaggaagaggcaaagaagtttgtgtgtgtgcatgagagataggggagggagttgggtagtgagagttgtggtggaaaaacacctgctttgtgctttttgattctttctggagcttagctcaactgaatgtcttttttttttttctttcaagaattgacatgctgatataagagctcaaaaaccagcaatttctaatgaggtttgctacatcaaatgtgatctaggccaaccttttttatttagctgtagtggaaaaaacaattctccaaaggctaattcttgctggaggtcacacagccaatttgtttcagagttgagactagagaatccatgtctcccaatcactggttcagtagtcttttctatggaggactccctcgactaatagttcaaacaacacaacatcaaataagccttgttctctatcaacctgatctatcttctgctgatagctgattaaacaaacgattatagcaacaaatgaatgattgtgactcgtttaactatatctggacctggaggtagctatttgtttttatattaggttttaaaaaatggatttaaatattataattctatagaaattatagagaacaagaatcagagcaatcactacatagctctatgaatttgctgcagagaattaagacataacatatcagatacatttgaagcaccctatgtattactttgtaatctatttctcatacttcttctttaaatgtgttgattatcatcttccatgaattaggttggtaaagaagttgacaaggggctttatatttttaaaatagagaaaatactgcaatataatatttgattacacgaataggggctggtacacaaatgtttgtccttcaatttccatttatgaatggatttgcttctaggctgtcttttccatgtcattatcatttgtctatttctgtattaattccacatcatcttaattactaatagtttcataagatttgatagctgacaaagcaagttctcccatattttcaagctaattttggctccttgtttttcctcattaattttagaatatgcttgttaagatccaaaaaaaactttgttgaaatatgataatggttttatactgtaaattgagagatgaataacatctctatgatattaagtcaagccattttggatatggtctatggtatcatttgtttccatttttatatccttcaaaactgttctgtatttttttccacaaatgtctttcacacattttattagatttgtgcctaggtaatttatagatttattgttattatgtaggaagaatactatatttgtataatatatatagtatatatgtatactatatataacatatatgttacctgtgtactatatataacatatatataacatatacactgtatgtaatagatgtgtatactacaggtatttacaaatactatcagttttcatgtattaatcctacagctaggaacctggctaaactccctaatagtttgtagttacttttaggttttctatggttgcaaccttgtaaatcccatgtaatttcagtttatgttttccttttcaaccattatgccttgtatttctttttcttacctcattgcattggccaggttgccattatattttaaataagagcagttatgttttagatagataatttttgtcaatttaaaaatttatcttccatttattgtttgctaatttggtttatttttcaattttatgagtgtggaattttatcaaatatatcttaagctcctactgagttaatgttatgtttttttccctttaatctgttgtcattaatagttttccacatattgaaacactcttatattttcattaatttttattgccctataaaatctgatattatcagctgaaagtcatgcttgccaaggattttcaaggttaaaaatcactaagtgtgagtcttgtctttaggaatcaagtggtgcatcttaatggatgtgtatgtgcacatatgtatacacattaatttagataaacacacatacatctagtcacacataaatacataaatatacatgcatataaaataaaatataaataatggtgcttatactttgtccattttatttcaggacaatcactgaagttttcattgttgaatactaacaaccttttgtaatagccatatattacaattggtgtagcaatgagaacaaaataaagtgaagctctacagaattttaaataagcctaagcagtactacaaacagcattcattttggctaaacactatgatgtcctcttaagaacattacttaaagattttaaagctcattttctctttagtaatcacgagtttggagtgaagtggcaatgtagggaataaaaagaacttactataaatggtatttgaaaattccttatgtggatccacatagtgttgctaggaaacatggtttcttagcatttggaaagctagaaaaccaagtttcttacctcttttggccacagaaatctgtatcatggatctgatttaagagagtttggagattagttggcttcaaaatattcggataagcataaattatgttttatgaccaaccatcccttaagaaataataacatgttttcaactcatgctcaaaaataggaaaatataccctgtatcatctttcattactgggatatcacataactgaaatattagaatagtggttaaaactatagtgatgattaattttacatgtcagcttaactgggccacagggtgtcctgatatttgatcaaacatgatggatgtttatgtgagggtatttctgaatgagattaatgtttgaattggtagattacttaaagcagcctgtcctccctaatgtttgtgcctcatgtcatcagctgaagtcctgaatagaacaaaaggctgtccctctttctattagcgaggattcttcctacttgactaccttcggattgagacattagctcttttcctgctttcagactcaaactgaaacgttggctgtttctgggtcccaggcttgcttaccttaggacaggaactacatcactggctctcacggttttcaggccttcacactcaggctgggaccaaaccatcagctagctatcctgggtctccagcttgccgagtcaccctatagatcttgggagttgcctgcttccataatcatgtgagccaattccttacaataaatctatctatctgtctgtctacatcctattgtttctatttctttggagaatcctgactaatacaaatataaactctatagccagattggttaggtttgaattacagctttgtcacttactgcctatgtgactctcagcaagttatttaaaatctctgtgcctcattttcctcacctttaaaacagggaaaacaatagcacctgcctaatggaactttgtgagaattaaatgagctattacatataagacacttagtaggacgcctgaccataataaatgttggataaatgttacctattattactgtgtggttgctgttgtcattcttgtattagaaaatgtattttcaggtggaactattacaaatttcaccatttcttacactcttaagacttcttaagcaaatagaatttactcttgccaatattaatctagagatggatagcccagtgagaaatttacattctcctgctaaatgggtttcctataacattgccagaaacccagcaagttgaaaaaaatatacagaaaaagaaagaaacaaatgtagactctgtgggtgagtgggtgcatccatggaattaaagagaaagggggacagtttaaatggaacgctggatgtatgtcttaagtgcatttgtatcaaaagaagggcatatatatgaaggtataaaatgtaatttcttcagcttcataaaaaccttctgggtatgaagagagattgatgaaacaagtatcaatatagaagtaaacaccatcagaattcagaactggaagtgaagaacaattctgtatgcaaattgaaaccaccagagggaacctaggtaggtggaatataattacccaaactggaaagtgcccaggaagctggattaataatctacattttaaagaagtgccaggcatttttgaagtcaaaaatgttcagaaacttttgattatgttttataatcacaaaatattttgaaagtacattcaatgtactagttggaaccataccaaaaataagagctcagtgagaaggaaagaggaatgtggtgctttttattgttatatatatttcatctttttatagtattgaggaggcttatatttaaatagaatgacagaaatgaattattccctcttgacgggtgcaaaatcttagagcattatttttctctcaaagcaaactataggattcaattccccattacaaggaaaaatgaaaaaagtatgatagcgagttttattagagagtgtactcgaagcatttggagaaattttagaaagagattgtcacaatagcatcgaaataaatcttaggaatgatttctacagtttgtaggcagaaagctatctaggttaaacgagtcatttcttcagccattagatctgcccttctgtaatagctgcacagttttgcacaaagggctatatgttagggccagcaaccaggagtcttgattttaaaagaaatgatgtcggaagtgctggctaattaacaaaaggcattggcaacatttacggacttataagcagtgaataacattgttcttttcattttatcatatgaaagtgttcacataactattatctgctatccttgaatggtgaggtgggaacaagaagacctatacagtatctgcataggaagtggtgaaataaatgtttacttgttttaaacagtctctttttagaagatcagtgtgttctttacagttacagtgagaactgtaagtctgcttgtctgacttttcgtgaaatgctcttccaaaatgacgacatagaccaagtatatattcctaaaacctgtgccaagcagctttcctatcttgtattagcattgagttaactagcaacatcataaaatagatggaagaataaagattaacctaatgaatcaatgaataggtaaatatttttaccacagacaagtcaagggtaagggtatttatgaccctctatataagaccatctttctcatccgtgacatggaacaggcatagaatgttggctttgtgttaagagggaaatttatagcattaaatgcccacattagaaagctagaaagatctcaaatcgataccctaacatcacaattaaaagagctagagaagcaagagtaaattaatccaaaaactagcagaagacaagaaataactaagatgagagcagaactgaaggagatggaaacatgaaaaaccctccaaaaaatcaatgaatccaggagatggttttttgaaaaaattaacaaaatagatagactgctaactagactaataaggaagaaaaaagagaagaatcaaatagacacaataaaaaatgataaaggggatatcaccactgaccccacagaaatacaagctactatcagagaatgttataaacaactatatgcaaataaactagaaaatctagaagaaatgaatagattcctggacacatacatcctcccagaaaccaggatgatatcgtatccctgaatagaccaataacagtttgaaattgaggcagtaatagcctatcaactaaaaaataaaagtccaggatcagacagattcacagctgaattctaccagaagtacaaagaggagctggtaccaaaccttctgaaactattccaaacaactgaaaaggagggaatcttccctaactcattttacgaagccagcatcatcctgataccaaaaccgggcagagacacaacaacaacaaaaaacttcaggccaacatccctgatgaagatcaatgcaaaaatcctcaataaaatactggcaaaccgaatccagcagcacatcaaaaagcttagccaccacgatcaaatcagcttccttcctgggttgcaaggttggttcaacatacgcaaatcaataaatgtaatccatcacataaacagaaccaatgacaaaaaccacatgattatctcagtaggtgcagaaaaggcctttgataaaattcaacatcccttcatgttcaaaactctcaataaactaggtattgatggaacacatctcaaaataataagagctatttatgacaaacccacagccaatatcatattgaatgggcaaaagctggaagcattcccttcgaaaactggtacaagacaaggatgccctttctcaccactcctattcaacatagtattggaagttctggctagggcaatcaggcaagagaaagaaacaaagggccttcaaataggaagagaggaagtcaaattgtctctgtttgcagatgacatgactatatacttataaaatcctatcatctcacccaaaaactccttaagctgataagcaacttcagcaaagtctcaggatacaaaatcaacgtgcaaaaatcacaagcattcctatacaccaacaatagacaagcagagagccaaataatgaatgaactcccattcacaattgctacaaagaaaacaaaacacctaggaatacagctaacaagggatgtgaaggacctcttcaaggagaactacacaccactgctcaaggaaataagagaggacacaaacaaaaggaagaacattccatcctcatggataggaaaaatcaatattgtgaaaatggccatactgcccaaactaatttatagattcaatgccattcccatcaaactaacatcgacattcttcacagaattagaaaaaactactttaaatttcatatggaatcaaagaagaccccatatatccaagaaaatcctaagcaaaaagaacaaagctggagtcatcatgctacctgactttgaactatactacaaggctacagtaaccaaaagagcatggtactggtaccaaaacagacacatagaccaatggaacagaacagatacctcagtaataacaccacacatctacaaccatctgatctttgacaagcctgacaaaaaaaagcaatagggaaatgatttcctattcaataaatggtggtgggaaaactggctagccatatgcagaaaactgaaatcggaacccttccttataccttttataaaaattaactcaagatggattaaagacttaaacgtaaaccccaaaaccctaaaaaccctagaagaaaacctaggcaataccattcaggacataggcatgggcaaagatttcatgacaaaaacaccaaaagcaattgcgacaaaagcaaaaactgacaaatacgatctaattaaagagcttctgcacagcaaaagaaactaccattggctgggcgtggtggctcacacctgtaatcccagcactttaggaggctgaggcgggtggatcatgaggtcaagagatcaagaccatcctggccaacatggtgaaaccccctctctactaaaaacacaaaaattagctgggcgtggtggtgcatgcctgtagtcccagctactcaggaggctgaaacagaattgcttgaacctgggaggcagaggttgcagtgagccgagattgtgccactgcactccagcctagtgacagtgtgagacttcatctcaaaaaaaaaaaaaacaaaaaacctatcagagcaaacaggcaacttacaaaacggaaaaaattttttacaatctacctatctaacaaaggtctaatatgcaaaagttaaaggaacttaaacaaatctacaagaaaaaaacaaccccatcaaaaagtgggaaaacgattatgaacagacagtgctcaaaagaagacatttatgcagccaacaaacatatgaagaaaagctcaacatcactgatcattagagaaatgcaaatcaaaaccacaatgagataccatctcacaccaatcagaatggtaattattatttttttctataagttttattaatatttgaatataattcacataacataaaattcatccttttaaagtatgccatttggtgattttttgtatattcagaaagtcatgcaagcacaaccactatctaatttttttttattatactttaagttctagggtacatgtgcacaacgtgcaggtttgttacataggtatacatgtgccatgttggtgtgctgcactcattaactcatcatttacattaggtatatctcctaatgctatccctcccctctccccccaccccatgacaggccccggtgtgtgatgttcctcactctgtgtccaagtgttctcattgttcaactcccacctatgaatgagaacatgtggtgtttggttttctgtccttgcaatactttgctcagaatgatagtttccagcttcaaccatgtccctacaaaggacatgaactcatcattttttatggctgcacagtattccatggtgtatatgtgccacattttctttattcagtctatcattgatggacattggggttggttccaagtctttactattatgaatagtgccacaataaacatacgtgtgcatgtgtctttatagcagcatgatttataatcatttcggtatatacccagtaatgggattgctgggtcaaatggtatttctagttctagatccttgaggaattgccacactgttttccacaatgggtgaactagtttacagtcccaccaacagtgtgaaagtgttcctgtttctccacatcctctccagcacctgttgtttcctgactttttaatgatcgccattttaactggtgtgagatggtatctagttgtggttttgatttgcatttctctgatacccagtgatgataagcattttttcatgtgtctgttgggggcataaatgctttcttttgagaagtgtctgttcatatcctttgaccactttttgatggggttgtttgattttttcttgtaaatttttaagttctttgtagattctggatattagccctttgtcagatgagtaggttgtaaaaatgttctccctttttgtaggtttcctgttcactctgatggtagtttcttttgctgtgcagaagctctttagtttaattagatcccatttgtcaattttggcttttgttgccattgcttttggtgttttagtcatgaagtccttgcccatgcctatggcctgaatggtattgcctaggttttctttaagggtttttatggttttaggtctaacatttaagtctttaatctatcttgaattaatttttgtataaggtgtaaggaaggaatccagtttcagctttctacatgtggctagccagttttcccagcaccatttattaaatagggaatcctttccccatttcttgtttttgtcaggtttgtgaaagatcagatggttgtagatgtgtggtgttatttctgaggactctgctctgttccattggtctgtgtgtgttttggtaccagtaccatgctgttttggttactgtagccttgtagtataatttgaagtcaggtagcgtgatgcctccaggtttgttctttttgcttaggattgtcttggcaatgtgggctcttttttggttccatatgaactttaaagtagttttttccaattctgtgaagaaagtcattggtagcttgatgggaatggcattgaatctataaattatcctgggcagtatggccattttcacgatattgattcttcctatctgtgagcatggaatgttcttccatttgtatcctcttttatttcattgagcagtggtttgtagttctccttgaagaggtccttcatgttccttgtaagttggattcctaggtattttattctctttgaagcaattgtgaatgggagttcactcatgatttggctctctgtttgtctgtgattggtgtataggaatgctgtgatttttgcacattgattttgtatcttgggagtttgctgaagttgcttatcagcttaaggagattttgggctgagacaatggggttttctaaatatacaatcatggcatctgcaaacaggggcaatatgacttcctcttttcctaattgaataccctttatttctttctcctgcctgatttgccctggccagaacttccaacactatgttgaataggagtggtgagagagggcatctctgtcttgtgccagttttcaaagggaatgcttccaatttttgtccattcagtatgatattggctgtgggtttgtcataaatagctcttattattttgagatatgttccatcaatacctagtttattgagagtttttagcatgaagcgttgttgaattttgtcaaaggccttttctgcatctattgagataatcatgtggtttttgtctttggttctgtttatatgacggattaagtttattgatttgcatatgttgaaccagccttgcatcctagggatgaagcccacttgatcgtggtggataagatttttgatgtgctgctggatttggtttgccagtattttattgaggatttttacatcattgttcatcaggaatattggtctaaaattctcttttattgttgtgtctctgccaggctttggtatcaggatgatgctgtcctcataaaatgagttagggaggattccctctttttctattgaatggaatagtttcagaaggaatggtaccagctcctctttgtatctctggtagaattcagctgtggatctgtctagtcctggactttttttggttggtaggctattaattattgcctcaacttcaaagcctgtaattggtctattcagggattcaacttcttcctggtttagtcttgggagggtgtatgtgttcaggaatttattcatttcttctagattttctagtttatttgtgtagaggtgtttatagtgttctttgagggtagtttgtatgtatttctgtgggaccagtggtgatatcccctttatcatttttttattgtgtctatttgattcttctctcttttctccattattagtcttgctagtggtctattaattttgttgatcttttcaaaaaaccagctcctggattcattgattttttgaaggtttttttatgtctctatctccttcagttcttctctgatcttagttatttcttgccttctgctagctttttaatgtgtttgttcttgcttctctagttcttttaattgtgatgttagcgtgtcaattttagatctttcctgctttctccggtgggcatttagtgctataaatttccctctacacattgctttaaatgtgtcccagagattctggtgtgttgtgtctttgttttcattggtttcaaagaacatctttatttctgccttcatttcgttatgtacccagtagtcattcaggagcaggttgttcagtttccatgtagttgagcggttttgagtgagtttcttaatcttgagttctagtttgattgcactgtggtctgagagatggtttgttataagttctctgttcttttacacttgctgaggagtgctttacttccaactatgtggtcaattttggaataagtgtgatgtggtgctaagaagaatgtatattctcttgatttggggtggagagttctgtagatgtctgttaggtccacttggtgcagagctgagttcaattcctggatatccttgttaactttctgtcttgttgatctgtctaatgttgacagtggggggttgtctcccattattattgtgtaggagtctaagtctctttgtaggtctctaagggcttgctttatgaatctgggtactcctgtattgggtgcatatatatttaggatagttagctcttcttgttgaattgatccctttaccattatgaaatggctttctttgtctcttttgatctttgttggtttaaagtctgttttatcagagactaggactgcaacccctgcttttttgtttgtttgttttccatttgcttggtagatcttcctccatccctttattttgagcctatgtgtgtctctgcacgtgagatgggtttcctgaatacagcacactgatggttcttgagtctttatccaatttgccagtctgtgtcttttaattggagcatttagcccatttacatttaaagttaatattgttatgtgtgaatttgaccatgtcactatgatgttagctggttattttgctagttgttagtttgtttgttagttgatgcactttcttcctagcatcgatggtctttacaatttggcacatttttgcagtggctggtaccggttgttcctttccatgtttagtgcttccttcaggagctcctgtaaagcaggcctagtggtgacaaagtctctcagcatttgtttgtctgtaaaggattttatttatccttcacttatgaaggttagtttggctggatatgaaattctgggttgaaagttcttttctttaagaatgttgaatattggcccccactctcttctggcttgtagagcttctgctgagagatccactcttagtctgatcggcttccctttgtgggtaacctgccctttctctctggctgcccttaatattttttccttcatttcaattttggtgaatctgacaattatgtgtcttgaagttgctcttcttgaggaatatctttgtggcattctctgtatctcctgaatttgaatgttggcctgccttgctaggttggggaagttctcctggataatatctcgcagagtgttttccaacttggttctgttctccccgtcactttctggtacaacaatcagatgtagatttggtcttttcacatagtcccatactttttggaggctttgttcatttctttttaatctttttcctctaaacttctcttctcgcttcatttcattcatttgatcttcaatcactgataccctttcttccacttgatcgaatcggctactgaagcttgtgcatgcatcatgtagttctcgtggcatggttttcagctccatccggtcatttaaggtcttctctacactgtttatcctagttagccattcgtctaatcttttttcaaggtttttagcttctttgcaaagggtgtgaacatcttcctttagcacagagaggtttgttattactgatcatctgaagccttcttctctcaactcatcaaagtcattttccgttcagctttgttctgttgctggcaaggagctgtgttcctttggaggagaagaggtgctctgatttttagaattttcaacttttgtgctctggtttctccccatctttgtggttttatctacctttggtctttgatgatagtgatgtgcagatggggttttggtgtggatgtcctttctgtttgttagttttccttctaacagtcatgaccctggaaatgctgcaggtctgttggagtttgctggaggtccactccagaccctgtttgcctgagtatccccagcggaggctgcagaacagcaaatattgcagaacggcacatgttgctgcctgatacttcctctggaagcttcatctcagagggacacccggttgtatgaggtgtcagttggcccctactgggaggtgtctcccagttaggctactcaggggtcagggacccacttgaggaggcagtctgtcctttctccgatttcaaactctgtgctgggagaaccactactctcttcaaagctgtcagacagggaggtttaactctgcagaagtttctgctgccttttgttcagctatgccctgcccccagaggtggagtccacagaggcaggcaggccaccttgagctgcagtgggctccacccagttcaagcttcccagccactttgtttacctactcaagcctcggcaatggcggacgcccctcccccagcctcgctgccgccttgcagttcaatctcagactgctgtgctagcagtgagtgaggctccatgggcatgggaccctccgagccaagtgccggatataatctactggtgtgctgtttgctaagaccgttggaaatgcgcagtattagggtgggagtgtcctgattttccaggtaccatctgtcatggcttcccttggctaggaaagggaattccccaaccccttgcacttcctgggtaaggcgatgccccgccctgctctgtgggctgcacccactgtccgacaaaccccactgagatgaacccagtgcctcagatggaaatgcagaaatcacctgtcttctgcatcactcacactgggagctgtagactggagctcttcctattcggccatcttgggaccatccagaatggtaattattaaaaagtcaagaaagaatagatgctggtgaggctgtggagaaataggaatgcttttacactgttggtgggaatgtaaatgagttcaaccattgtggaagacagtatggtgattcctcaaagatctagaagcagaaataccatctgtcccagcaatcccattactgggcatatacccaaaggaaaataaatcattctactataaagacaaatgcacacgtatgtttattgcagcactatttacaatagctaagtcatggaaccaacccaaatgcccatcaatgttagactggataagaaaatgtggtacatatataccatggaatactatgcagccataaaaaaatgagactatgtccttagcagggacatggatgaagctggaagccatcatcctcagtaaactaacacaggaacagaaaaccaaacactgtatgttctcactcataaggggtagttgtataatgagaacacatggacacaggggggtgaacaacacacaccaatgcctgttgtggggtggggaatgaggggagtgaacttagaagatgggtcaataggtgcagcaaaccaccatgacacacgtatactcatgtaacaaacctgcacactctgtatatgtatcctggaacttaaagtaaaaaaaaaaaaaaaagaaaaagaaaaaaatctcagtacaaaagatatgtctcatacaggaacaaaaacaaaacaaaacaaaaaacaatattggctttgtatctccacctgcctgcatctacttttaccactgaatacctcgctattccatgctatgagaaccctatgattcagttatatcaaatgatttgccatgctctgaagtcacccaactttcacttttcatatttgcctttcttcagtgatatggtttggctgtgtccccatccaaatctcatcttgaattgtagctcccagaagtcctacatgtgggagagacccagtggaagataactgaatcatggaggaagttttccccgtaccgttctcacggtagtgagtaagtctcacaagatatgatggttttataaggggtttccctttttgcttggttcttattctctcttgcctgccaccatgtaacatgtgtctttcacctcctgccatgattgtgaggccccctggtcatgtggaactgtgagtccactaaacccctttttctttataaattacccagtctcgggtatgtctttatcagtagtgtgagaatgaactaatacactcagcttgagttgctcttcctttatattatcctccaaaaagtttctacttatcctgtaaggttcaactgaagggtcagcatactgatatatcctcttttaacttctggacagagttgtgtatctgttctattatgcttcatttgagccctacctatttctatcacagcaagtgtcactgaactgtgaatatccacttccattacaacggagttccttgagtgaaaaatacataatacctatgagtaattaatttctgcatggcattcatgcagccatattcattttatgtgcatcattttactatcaagagttaaaattaatggtcagtgattttcatttcttgcaattttacttccttagccagcataggttcctggcatcatttcttctcaaccccaacagaggctcaattccagtactgactggaatgcttttcatgcatgaagaatattgaaaagagctctttcttactttcatgtcttatttaaacatgttacttgctttattttttaacctttaatgactatcacttgccttatttgtcacatttggactaaataatcatttcattttgtcagccagtgttaattcttatggcttgttattgaaactaagcaaattcaatgtatagcatgagtaagatgggacagagaaaaagggaactctgaagaaagtgagctattgactgtgtccctacaaaagtagagatcaatatgtaggtaagaggtaggaaggaaggctgagaagaacagactagaaaggcagtgaagtgagactcaagcgatttaaattctcatcttgcttcactttcaacttcttgtataatattttttttcctctttgggcctcatttatctcatttgttttttgagggcgatgtacttaagtcttttgtatagcaccagtatgattttgcaatatccacacataattgtattagtatttgcttaaataaaaattaaactagtgctcttaactttatgccattcccacaataatcataagcaatgatatctatataataaaccaagttaatgagctatttatttttgtgtgtacattaattacatggacattaattttttaagtccatcctatacacctaaaataacaacagctgacatttatctaaattttgctgggtgccatgtgctgttctaagctatttatttgtatttactcatataatcttcacaacatccattttaatactaattttacaggtgggaaattgtggcacagagaagttaaggctttataaaaagccatgtagcttgtaagtggcagagtcaggactcaaactcaggcagtctgtagtcacacttgggaacaatgaactagaagacatctagggtcctttccagcatcacgaccctctgattttgcttttctctggagcacactcttctcagttcctaagagagtattttatttctacttagcttaataaggtcctttcaaatagagtctatattaggctgtatttgatttttagccttttcactgtcttttatctcctcacaattacataaaattgttcacttagccagttatgaacaatgcagaagtcaaatttcattgcagtcccagaaatcactttatctaaaagtactataaaaaacattcattcttgactatgaagaggctgtacaaagttacctcttttcaagagagtcagtctgcccttgaaacttagtaatttactaaccatcatttttttttctaaaaagaaatatcaggcacagaaatttagagttgaaaggagcttagctgttatgtggtcctaacaccaaacattgaaatatccctgcctagactccctgaatgttggtcattcaccttttggagaagaatcttcagaaagtgaaattactatgtccattattaggtgttccattcattggtaaatacacctcattccctttctgaaatcagatatgccgtatatgtacagtatgtaccacataatgatatttcagtcaatgatggactgtatacacgatggtggtcccataagactataatgaagcatatagggtcttcaaaaaattcatagaaaatgcatattatgaaaaagtatgcatgaatttccaattttttacacaaaataaactcatactgaacaggatctagttgagtctctaagaaagatgagacatcagtttgaaaagagcccctatcacagcaacatgaatcctgctaaaattgaggcaagaacaaacattgaatttacactgaagcttgggtgtgagaatggtgaaatcattgatgctttatgaagagtttatggggctaatgccccaaagaaattggcagtttacaaatggatagctcattttaaaaaggagtgagaagatattgaagatggcacctgcagtggcagaccacccacatcagtttgcaaggaagaaaattcattttttccatgctctaactgaagagggtcaacgattaacagcagaaacaacagcgaatgccatagacatctaaatttgttcaggttacacaattctgactgaaaaattaaagctgaacaaactatacacttgatggttgctaaaattgttatgcccagatcagctgcagacaaacggaaattttcaataagtcggatcaagattctgaagcatttcttcaaagaattgtaataggagatggagcatggttttatcagtacgatcctaaagacaaagcataatcaatgcaatggctactaagaggtggcagtggtccagtcaaagcaaaagtggaccagtgtattagtctgttttcatactactataaagaactgccaaagactgggtaatttataaaggaaagaggtttaactgactcacaattcagcatggctcggaggcctcaggaaatttaaaatcacagcagaaggtgaagagaaagcaaagcaccttcttcacaaggcagcatgaaggagaagtgctgagtgaagtgtgaaaagagtccattattaaaccatcaaatctcatgagaactcattcactatcacgagaacagcatgagggaaattgctcccacgattcaattacctccacctggtctcttccaagacacatggggattatggggattataattcaagatgagactggggtggggacacaaaacctaaccatatcaaccagtcaagagcaaatgtcatggcaacaggtttttgggatactcaaggcattttccttgttgactttctggagggtcaaaaaatgacattatctgcttattatgagagtgttttgagaaaggtagccaaagcattagcagaaaaatgcccagaagcttcaccagagagtactcctccaccacaacaatgcttcagctcactcctctcaccaaacaagggcaattttgtgagagtttcaatcagaaatcattaggcatccgccttaccattctaatttcactccttcttctctctgtttttgaatcttaaaaattctttaaggacacctgtttttcttcagttaataatgtaaaagagactacattaacattgttaaattcccagtacaggacttgagggatgaactaaatgtctgatattgttacgtaaaaagtgccttgaacttaatggagcttatgttgagaaagtttatatatttcttacttttatattttaattttttttttacaaactttttgaagtccccttgtttaaagaaacctgatatatggcacttgatattagcattgcagttcaagtagggaaaatagttgatatgcagtaattgtgctgagagagttttccacataaggtggatgcctaatgacaattttccacatgaaaactatatttttatgtatatttgatgcagatgaaacatatataaaatataaagttcacaaatactatatgaacatcatagagtatatgtatacaaacctagattttatatataatatataatacataatttatatattatattataataaatattatatatatttatatacaattatatataatacaatatataatatattaatgttatattataatatatcaatatatattaatataactaatataattaatatattaatatacaataatatataatatataatatataattatattatatatttattataattatataatatattatctattatataatataatttataattataataattataatttattataattatataaataattataatttattataattataacatataaaatatgtaattatatattataattacatattatatataattatatattataattacatattatatataattacatattatatataattatatattataattacatattatatataattatatattatattgtctataaattatatattatatattatattataattatatatgtaaaatatatatattatatattatatataaaatctaggtttgtatacatatactctatgatgttcatacaatgttgaaattgcttgctgatgtatttctcaggacatatccccattattaagcaacgcatgactctgtgtgttagggaggtatatgtatcccccccatatatatatgccactcattggtcttaccttgttattttcaagcaaaataaaagtcggttttctttttccaaaagttgtatatatttatataatagataatattcattttagtaaaattaatatcttttcatggaagataatttagaaaagtattaaaatgaatacaaatcatccataatcccagggatcagcactgttgctaatatttttatattttcttctcttaatgtgaacatatatgcatgtactagtattctgaatatatctatttttaaactaacgggattatttatatgatcctattttctgtgtgtggtgaggctcctcctgatactctactacatacagatgaataaatttttaataatttttggggaaaatgaagaacatcataaaggtaagggcatctacttccagacaaaatgggataactgaccaaatgtgcactccttcctaaaataaaaagtgaaaatatataaaatgataatttgcaagacactgaaaagcaggaaatgaagggccaaaatctctgagaaacagcaaacaagttgagtcctatatttgccccagtttattgccttgagagagtctctaggctgtagtgcaggagaagggtaaccaggagatgaacttgacagtctgagaagacagaggtaaacagagttgtccagatagtatctaacggggtgagcaaaacgtcgaagatccatagaggaactccctcgaatattcagtgcatgcatgtgaggaaataacccaacactgggggaaaaaacacctaaaagaattagtggcaagactgcccagtgcccacacaggaccaggaacagtgcttgctcccattagtcagattagaattaggtggagtacacagaaggttcttgcctcaacagcaggaaataattggccttagatttagtattgctgtgttctggcctaacatagttaaaaagaccccaaaagatcaaaatgtttccaagtaagtcaatttcatcccaaaaaagccctcaaaaatatttatagaaatataaaaatatatccaacatcaagcaaggtaaaatttatcatgtctggtatttgatcaaaaattacaagcatgaaaacaagtaggaaatatgacccaattaagaaatataataatcaaatttgaaccagaattgacagatgttagaattggcatatgagaacattaaaatattgaaacttacatcaaaactgtgttccatattttaaaagataagtagagatctgaaagatatataaaaagactgaaaaaacttctggagataaaaattcagtctaagatgagaaacatactggctagaataacaagtaaattcagcaatgcaaaagaaaacatactaatgaaaacttgaaaacatggcaactgaaaatatcaaaaataaaactcagaaaaaatagaatccaaagaaaaatgaacagagcctcagtgaactatggagcaacttcaagtggcctaatatatgtgtaattggagtaactgaaaaaaggtttggggtatgaggacagaaaaaaatatttgaagagataatagctgacatttttccaaatttgatggaaactattcttatttttcatttaacattatgttgtcagaattcttctttctttctgtgtatcatgtgaaaacacagttcctgaagactacaaaattccctcccatggatgttttatgatttatttagccatttgtgcctgtacattttgattatgatttttcataattataaatgatgttgtaatgaatctttatacccataaatgttgatctgcatctgatccttgagatatattccttgaaatgagtttacagggtaaggttctacatatatttttagagtcttgatatataattttaagccattttccagaaagatcatatagtacttgtacatttgtacagtatatgtagtatgcattgtatattttaccacattctggtcaacaaatgtctttattaaagaataaaaagatattactgaaaaagacaaacttagctacttttgtaggtaaaaattataagccttaaaaatctgcatttcttatattattaatagctaaaatattgttcatgttcattgcaaatgccacttcatgtccttaggccatttttctattagttttaagtgtttttcttacatcaatttctaccagctgtttatatgttaaggatattaatattttatatttgtgatgaacgtttttcaaagattagacaaaatctacatgtttacatcatatgatgtattaataatttccagagctcccaccctctttaaagtgcattcacatttatcattgttcttatgtcctaaacttgcatctatttctcccttaaactgatattttctattttggttacagagcccaaacctaagaattaagtgtacactaatttcatgtatatcagaatctgttctgcttaattcttcagttcaccttatctaagtaatttctctttcacatcataagagaattaaaagtaattaagatccaatccaagggctatggactagggtaaagcctgtggtacaacttaatggaagaaatattttcttccttaggagttctatcagttatacttgagcccattgttcttgaaagagttaatgtcttatttctaaaatatgtctattatagattcaagtaaatccagctacacttacttaatgcacatatccagtacataagagaaatggaagattcctagcctgagtgccaggaaatgcagtttagatatggccctgccatctttccagaacttgatttccttcccagctacaaaatgagatccaaaccagatgatcctcaggaaccaatccagctctgaaattcgacaactttgtgattgttctataaaacaaatattacatttccctccaaaggatcttctgggattatttgcatctgttttagaaagattggaggtgggaaggggtcaatttttaatggctgcaggtgttttacaaatgtcaaagatacattgcttgcactgatagctaggtttaaaatcttcagaaaataaatgcataattagatgtttccagcatttatatagtgaatctgttcggtctttcatgcttcaaggagctaatagaacctaatgcttcctttgaaatcagtggaagctctaaacccatctaatgtgctagcttataactaacagaaaaattgggtcaatttttatcccactgatgaaaaataaatcaaacaagtgtatcttttaaacagcatgtaaaccatttaatacttagtgtactaggttatgtgcatagttttgggaaacatgaaagtgtgtgaccaaacagacttcaaatacatcatttttatacattcgagggtggttatttaaacaatgcattgatgaatccattggatattgctaggggtgggaaaaaagctttgtaatcacttgcatccaaataatacaagtttataattttatttttataaactttatgattataatcatattcatgtatatgaccgtgcatgtgttactgttaataacaacttgtgttttaagacataaaatggttttataatatgctcatggattcctggattgaacctgacacctctgggtttacttaacgtcctaaaaaaagaaacagtactctaatatggggctagatattactgaaaaagtcaactagtagcagtaaatgtcaaaattcaccttaaaatggcatctctaattataagtcgacagtagcaaagcattggcagtttccatgatattacatgctttacaacctcctgcagctgccagccaaatctccgtttctcttctacatttgcttttccttcatgacatttaatcagtcaacaatatgaacgctggagttctcctaagccaccctacagtttaaaatcctgactacttcatgttcttctgaaagtggggcggggagagcagcaagtctttcagaatgagatctgtacttatcgatcacagcatcagcagggaaattggcctttgtaggggtgaatgtggttcgttcactgagaaaggaaaaactattttgggttaaaatgaaggcaaaacaattcaggcagctgaagaggcttctgaaaactggaaagatggaatttccagggtttgggcaatgaggcagagactaaatttatggaaagcagacaggagaacaacttcaggttagtctaaaaaaggaatctggagagagcttatgtagagaaaaatcacacagactgaatcatacgtggggaatgaatagagggaaaacctgactctgggagctgcgattatagaggaaataaaggcagtaaagattaaatatcagtccctaacactgcctcaaaaaagcctgacaatatattcacagctgggtataacctctgcaggcaccactaagtagtccttccgttctattgagttccttccacagtttgttcctcccttaaacctctcatgagaaatcctttccctcgatatgctgtatagcgtgttaaagtgtagtctgaggaccagcagcattggcatctcctaggagcttattagaagtgcagaattatggctccactcaaatctactgaaactgaacacaatttttccaagatcgtagatgattcatgcgcacattaaagtttgagaagcactgatctacaacatatacgatgtgctgtctaagacttttttactgcatatcaaaacataggcagatagattacaactgtacatcatttattcattctcttaacaaatactcactaaacacaggccctattctcaaggagttggcactttgctaccagttattgaactcccttccgttctctgcattgtgtgaggtgtcagggctagaaggataaatatggcattgtccctgcccttaattagatcatagatatgttaggaaatagttaatgcaaaaaagtgtcatggttttaatgctaaaaacgtgtacctggcactgggattacaggagaacaagtattggagacatataaggaaggtggtgatcaaggtttttagaaatggaaaagtttttatagaggtgagctgagctttcaaaaaaaaaaaagctttttttcttttttccaggtggaccatggggcattgtgggcaggatgaaggaagggttagaaagaagggtgtacaagggagaggaaacaatcttaacaaaggctcaagggcaagaaacaggttggcctattcagagaactttaagtaattccatatggctggatgataggttttgaggagggtggattggggtctggtggtcagagataaggctggagagcttgacaggggccagatttagggggctgtattgtagcctaagcactttgggattgatcctacagagcagcaataagaagtcactgaaggttttccagtaaggcaataacaagatcacgtttgtgttttagaaacatcactctggaggatgtttggggaatggtgattagccaatttggctgaagcacaaagtacacagagaaaagtaaaggcagataaggctggaaatgtaaatttggatccagatcatagaggatactgactgccatgctttgtactttgtaggcagtggggagacactgaaattttctgagcaagagaatgctttagactgggaagagactaaagacagaaggccagttagaaagttattgcaataatttaggcaagaggtaataagaacctgatgactctgagaatagaaattaacagatagattcaagaagcaggtgcacaattataagcacagtttcattactcattttaggataccacaatttcatacataaatcagatctttataaatgtcttcattttcacatcctaatatagcatttacttctgtaccaatcactgggtgagatactcttaacgttctttgggtcaccaaggaaaaaatctccttcctgttgatttagtttgcaggtccctgtctcagttccatgtggaagccgctgcatgcctctaagtcacccaaacccaaaataaaaattttgttacagaattgttctctatttgcctctttggttgtttctcaaccctgaatatgttcctaggaaggcttcttggttattctttattcactttcaagaaaatagccttcccttttcccatctccagccccttttctagtcccacatttttttcacttagaagcactgattccactaggtggtaggtagggagatcaaagtcacatttccagttctcagtttttttttttttttttttttaacaatgtgagtaagttgtagggtaggtacatgttgatcgcatttcatatacctcaactgctgccagattggttttttgtatgatttatggttatggagctttatggctggtgtgaggttattttgaatttatttagaaagctctttcaagtgtttcagtttcacatcatagaatatttataattctgggtcaggcatcatgtttagcttgacttccaagatacagaattccaaacagccatttgctcctctaaatagatagatagatagatagatagacagacagacagacagacagacagacagatagatagatacatagatacatagatacatagatacatagaaagatagaagcacagtatatctgtttcctgtacatcaattttcctggtactggatggcttcattctttctaattcaagacccaccaggcctcgagaatgattagaaacattcatgctttaatattaatacttacaaaatctccctgttcttatctgagctttgcatttttgttaagatgcttagccagaatggaagctgcccacacaatgcttgtataaaaattatacttgctcaataatattcatatctccacccactcttgagtggaacagaacaagcattatgatatgcatgtacacatttgcataaaaatataccatacacaaattcaagtttgcatgcccagttccaaatgcacaccaccatagaaatgcacatttgaaaaagcatgcaatctcaatgtccagacgttttcctccctagagagtgatttttttcctaaaatgaaagaataataatagccttaatttatgtagtacatttttttccattctcctccctttacaagagatgagtcaattattttatgagcaacttaaaaaagcataaattttttcttcctttacgtatggagtaaggcaaggtgtcccaggagactagttcctcatgcaaattcaagggtgaagtgaaatttgtcaatatattcttccttttatgacagtctttccttctcttacagctacctcaattctttgccagccagctgagagatctctattgaagaaatctcttggctaatctcccagtttcccatctcttactacaaaaggtttcaattcacaaaacacaggctgacacaatcctattgagtcctcgcgatggtcttgcaattttgtaaactcatagagcagatgttatatttatttaacaaacatattttccacttctaagagttctttcttttttctatttacgtgttgtatttttatttcttcctagttttcttcttcagttttaattttttaagcttttaaaatttttttcatttttaattttcatgggtacatagtagatgtatatatttatggggtacataagatattttgatacaggcatataatgtgtaataatcacatcacagtaaatgaggtatccctaatctcaagcatttattatttctttgtattatgaacattccaattatattgttttagttacttttaagtatacaataaattactgttgactatagtcaccctgttttgctatcaaatactagatcctattcattctattttttttaacccattagccatccctgctcccacctggttcccagctacccttcccagcctctagtaaccaccattttattatctccatgagttcaattgttttaatttttagctcccataaataaatgagaacatgcaaggttaatctttctgtgcctggcttatttctattaacataatgtcctccagtcccatccatattgttgcaaatgacaggatcttattatttttatggctgaatagtactccattgtgtataagtgccacattttctgtggtacattttcatttccatttgtctgctgatggatgtttaggttgcttccaaactttcgctattgtgaatagtgctgcaataaacatgggagtgtgtagctatctcttcaatatactaatttcctttccttggggaatatacttagcaatgggatttctggatcatatgatagttctagttttaattttttgaagaacctccatactgttctccatagtggctccaccaacttacattcccacgaacagtgtacaagagttccgttttctccacatcctcgctagcattcactattattgcctgtcttttggataaaagccattttaattggggtgagatgatttctcattgtggttttgattagcatatctctgataaccaataacgttgagagcaccttttcttatacctctctgccatttatacgtcttctattgagagatgtctattcacatcttttgcccattttttaattggactactagatgtttttttcctgtagagttgtttgagttccttatatattctggttattaatcccttgtcagataagtagtttgcaaatattttctcctattctgtgggttgtctcttcactttgttatttcctttgctatgcagaagctcttcaattggatgtaatcccatttatccctttttacttggcttgctggtgcttgtggggtatttttcaacaaatctctgcccagttgaatgtcctggagtgttttttcaatattttcttgtagtagtttcatgtttgagacattagatgtatgtctttaatccactttgatttgatttttgtatacaatgaaaaataggggtctagtttcattcttctcgtatggatatctagttttgccaccatcatttattgaagaggctgtgttttcccaaatctacgttcttagcacctttgttgaaaataagttcactttagatgtacggatttatttctgggttctctattctgttccatgtgttggtttttatgccagggaaaatattcttcatacatgaaggagaacttggatatactattcaagggtaaaagattttttccttcagcactttaaatatgtcatgctactctgtcctggcctataagggtctccactgagaagtctgctgccaggcatattgaaactccattgaatgttatttgtttcttttctcttgctgctttcaggatcctttctttacatttggcctttgggagtttggttattaagtgtcttgaggtagacttatttgaattgaatctgcttggtattctatcacttttttgtaattgaatactgatctctttatctaggtttggaaagttctcttttattatacctttgaataaacttcctatttcaatctctcttcatcctcttgaagaccaataaccattagatttcccttttgaggctatttgctaaattttgtaggtgtgcttcattgttttttcttttgtttctctgattgtacattttcaaatagactgtcttcaagctcggttattctttcttctgcttgatcaattctgctgttgagagaatctaatgcattctttggtatgtcaactgaatttttctgctccagaatttttgcttgatttttaaaaattatttgtctttttgttaaatttatctgatagaattctgaataccttctctgtattatcttgaatttcaaagagtttcctcaaaacagctatttggaattctctgtctgaaaggttacatatctgtctctccaggatgctcactggtatcttatttagttcatttggtcaggtaacattttcctggatagtcttgatgcttgtggatacccatccgtgtccaggaatttaagttaggtatttattgtagttttctcagtctagacttgtttgtacccattcttcttgggagggatttccaagtattcaatggaaattgagtaatgtaatttaagactttggttactgcagccatatctgcattagggggcaccccaagcccaggaacactgagacttttagagacttacagaggtccagccttggtggacctgagagagaattgggtgagatctgagagaattccatggattatcaggcatagaattttgttgtcttcttttactttccactaacaaacatagtctttcactctgtgctgagctgcctggagatagggaagcactccctggagggcacaaacactcctgtggccacctccactgaaattgcactgggtcagatctgaagccagcacagcactggatcttgcccaaggcctgtggtgaccactgcctgactactgatgatgttcactcaaggcccaagtgttcttaagtcagaaggcggtgaatccagacaggcttgtgtacttcccttcagggaggtaagctcccacttgtcccaggatgggtccagaaatgctgtccgggaaccacagcctggagtcagaatccttaggaatccgcttggtactattctactgcagctgaactggcatgcaagccacaagacaaagtccttcccattcttttctctcctttcctcaagcagtagtctcccctgtgggtaccactgccccaggcccatgttgtgtactgtgtggctattgccgatattcactcagggcccaaaggctcttcagttagcttgtggtgaatgctgccaggcctgagtctctcctttcagggcagtgggctcccctctggcccagggaaggtccagaaatgtcatctaagagctacggcctggaatctgggactttaagagcctgctttgtgctctactccactgtgaccaagctggtgcccaagctgcacaacaaaatctcctttattcttccctctcctttcttaagcaggagtctctcctcgtggccagctctgctcagaatatgctgggccatgccagaagccagcatgtctctgagtctcacaaggcacgtggcaagtactgcctggttaccactgatgtttattcaaggcccatgggctctttagccagcaggtgatgaatcttgcctggatgatgtccttcccttcaagatagtgggttcccttctggtgcagggtatatctagaaagacagggaagatagtgcctggactgggagcctcaggagttaggcaaactgcctaagaccttatttgactgtggctgagctgttatttccgagttgaaagatgaagtcccctttactctcccatctcgtctcctaaagtgaaaggaaggagtctctctcagaactgtgggcttcactgccttgggctgggtgaggagtggtgcaagcagttccttggctggtgtcccactaggtcatgtacaccccaagtccaatggcttggaaccaagcaaagggctaagatttgcccaggaattacagtccttgtggcatagaccatctttcaagtttatttaggacccaagggcactttagcccacagtggtggggctagccagaacttgggttccacaagctggaacggataattcccctctgactagggatgctctaagtgctccctcataggctcttgctgacttctcccctgtgttgctttccactatgatggggcagcacttagttgcaatgcaaagtccagcaatcactgcattcttcctctcccaaacacacaaattctctctccatgccacactgcattgtcagggaatggggcagggttggtgtaggcaattcacagctgtctttcctaccttctctttcctagatatgatgttaaaaccaggtactgtgattgctcacctaaattttggttgttataaaggtggtttcttgtgtggacagttgttcaatatggtgttcctgaggtgggggagtacaatcgctggagggttctattcatccaccttgttccacttctctccctatttcttcaagcttttagaaagtatctgttaggatgtattaatttcataaattagcttttgaaagttgattttgttagatgcattactcagttttagatttccttatgtatttttgaattctggttttcaggcgcccatcctccctacttctgccttgcccctgaccttggcttttgacagtaatcctagatccagtctccactttcgcacaaaacttttagtcctctaccaaacagaaactgagactctgcgtcagaccatagtagttcctaggtctcaatcctgtatacttcttaggtttctattccatttgagggtcactgaaatgttctatcttgcttttgaacttggccctgtcttttagattttttagtcttaatttctttcccattgttatgtattataaacttatggggtcatattgacaggaagtttgtggcatcctcattttatttatttatttttaattttatttttgtatttcctcagagacctttgttctgaacctcattttacagatagaaatgaactgaaaaaggttcattagcctgctccaagttgcaaacctaatcaatggtacagtctgggctaccatttaagtctttcacttggctctgatgatcaaaatttatttcattttacagagagctgctctcagtgaactgctgatcagctgtgataaagcaaaaaaagtaaataacttagagtcagagaacctgaactcaagttctcactctgccaattactagtttctcttggcctcagtttgcaatattgtataacagcaatacagtcatgtatcacctaacaacagagatatgttctgagaaatgcatcattaggcaattccatcactatgcaaaacaaacatcaaagagtgtacttacacaaacctagatggtatatattttttatttatatatatgtatatatattttcttatggaaaaccaaatgccccagtaccattagtaatatcaatcatttcccctacttgatctgcaatgccaatatccagtaccagatatcaggtttctagatatgctctattttaacattatgacccaaacattgctatgtgacaaatgactatattaccaattaccttacacagtggtcataaaattaatacatgtgagaacttttaaaaaaaatgcaaagcactatgtaaatgtgaaagtttaaacagctaaaagatttgtcttttcaaagatatataaataatatgtgtttacttctgagaaataataaaatacagataagcataaaggaaagaaattgtttgcaatgtaatttagcagtgtattcttctagatttatctcaatatatatatttaaattagcaacttaatcgagcgcacttgtcaaaattttatctatatccatctatacagtaataaatcatgaaactgtctcctcaagaagttttggggaagggttttgacacaaaatcaggtaaagtaacattaggttatttgccaaatatagcattaattgtcttaccttgatttgtcacagtctttgtgttcaggtctcaaggacaaagcttccatttagatgaagcctttcaacaaactatttgtggattactcttctatacttcatggttgcaagctagagaatcctctttagctatttggagcagaagtgaatcattctaggtattaattagctcatggaatcttttggagtgctagagaatcaagctcagatgtttcacaaccagaaacaaggcatccagcgttaaagccaacagatgaaatatccacgcacactacccgactattctagaagaactgcacattgatttcacacatgagtaccagtacctacacctagatttaagagatttcactaaaactgtccctaaagaaccagacatctctatcaccatgcttgccacatgtggctactgccttctctgttcccttctgcatctaaatttgctcagtagaaccaaattcccaatagaaatgtagcttcaaggaaatctagaaataaagttctgttttgttctgttttaatttttcagctctatggtaggaaggtgagatataatggatacagaatgggtaatcagtaagccagtctgcagtatctggtaagtactgtaagtaggtagaggtaggcactgtaatttcccccattttacagataaggaaattgagccttagaaagattatgttatttggtcaataataaaggtatatagaaggaagcaaggatttcaacccaggtattctgatcaacattcaccttttaactactacaatatttaataattacttcattacatgacttctccttagaagaatatgagtgactgaagaacaataattctttctaattcagtaagtatttttcagtatcaaattctgggggctgcattcattcaaaacttcatttagtcattcaagacttttaattaaatacctactatgtgccagtactcttctagagacctaggaatatggtggtgaataaaacgcgcatagttcctgatatcatggaggtcagcatttagtgttagagttatcaggtgaaaaagtatgcattaattaaacgcgactaaaaagatatatgaaaataagagagcatttaaatgggagatttaagctagcaggtgcaggcaaagaaagatttcctagggaagctgtttgagttatagagacctgtaagatgagtaagtatcagctagcctaagggacaggttctgggaagacagtattgtaggcacatggaataaatagagtatgagatgtcctggaggttgaaaggaggtcaggggattgaaagaagtcaagtgtggctaatcatagacagtaagtaaaaactgaccctgcgataagtctaaagaggtagaaacccaaccaatgttcattgaatgaataaaggtgtgcaatctctagtagatggtagctgtgatgccttctaaacttcctgcttccactgagattccatgattccaaaagaggcagtatatctttgtatatttagaaaagaaaaggcgaggccagagtggtaaactctcctaaaattatcaaaacatattgatagtctacattaacactttagaatgaatcacttttgtggatgctatggattctgcaaggagaaaattagaatggacccatttgtctaacacctaaaagtaaaatgggaaagactaacagaataatttagaataattaaaattaagtagattagttttttctcttcttctttatttgacctttgagataatgttttgtctttatgaataaagaaaaatctttagaaatttgcctaaagctccttctcaaaacaataagtgtacagaatgcttacatcaagaatactataatttatttttaatatatttttaatcaaatagaaaaaatcaaactgccctatttctgtcaaaagaaaaatgtgaatatattccatctatattcagtaggcagaatcctcaaaataactaataccaaatacaagttttcaaatctttcaaagatttacattatgtattccaaagtaacagctaaaatcatatattaacttacacatatatcttttaagtctaccaataaaatgtgtgaccattgaaacacatttagtgatgagcaggagccacattcaatgaagaaaattaagtagcagtccagcctctctagactacatgagaatagatccaatatcccatgattcacaattgtttttaaatacatggtttatttctctattatttgaagtttgtttttttacacatatatctgaacttcaaacactgtctgacattcctgaaatagctttaatattacttttctttatctcattgccttctctcccaggtcaatggacaaagcttaaggcttccagcataaggctaatccctttatctgtcctctgaatctcattgtcagctgctttttcagggaccttacttaattattgctctcctctcagcatctacaaccttttcctctcaactaaatctttactctcaccatataaccatgctaaaatctctgtgctggcaaaaacaatcaaagacaaataataaaataacccctcaagtattctctcctcatctgcaattcttgtcttctcttttatttacatccaatatttttgaagagtcattggtacctaccagcaattctttctcacctctcactcacctccactgcaaactggcttttacccttatgctccaatgaaattactcctgaaactgtcacagtgaccttttagttgctacatgcagcgggcacttttcaagttgggttgatccctcaggagcatttgatactattaaccagaaatttcctggagcatatagaactgtaaggaacaataagccatgttcccagaatcaccacatggaagggcacccaattaacactcaaataaactattctttgtgcactaaataaacctgcattgtgttagaccaatgggatttataaaactgttccagcacatagcattacttaccttgacaaacacatgagtcttattaggtcattcttaatctgtctccctgattacccaccattcccctgctgtgaactctatgccctagctacacaaaccactgtgtgtgtatatgcatgtgtgtgtgtttgtccatgctattctattcttaattcctttcttcctattatttgttgacacattcttttagtctcacttacagcctttgagaaagcttccctgtttctgacaagcatatttactccatttcacctcatatatctctctttgtagcactcatgctattgtatcataattgttttctgtctcttaagaatggattcttaggtttttggaatatgtaaattacaggaattctaggcatgctttatcaaaacaaggttgaaatgataaacactgggcccttacataaaattttgtaagaacatcaggttctgacaaagaagaacgaatttgtggttttatattttgtttccctttagttaaaccctagatatcaaagatttataatttcttaaaaataaaatcttgcctacttttgggcaacaaatacatgaaccaaatatcctttgtatctaatttccttagaggtgattttctatgcataacagaattatcttttgcaaattatatttgcatatgatcagtcacattttttgtatttcaaatgtattaatatttcaattagctaaaagcaataagaaaaagatttatctagtctgctgtggaagtgctaatataattttaaaaaacaactaagagcactaattttgttgtcaatttcatatccttataattacctcttaaataggctgcacttctctcatggtaatcactgctgttttcaaatggcttgcaaagaagaaaagcatttaagctaactcctagaacagatgaaactatttattttgacatttgtcggctttggaccatgtcctttccaattctgaaaaagacaacctgggaacttacgtgtttagaacaaataattttaataactttggaggtgatttaaaatggagccaattttaggtgtcagataaaatgatcctaattcatcttatatcaaagatactgggcagtgacattggttggggtgtggtcaaattgttactatgccaatcactcagtaaaggagtctgaatcgtcagtggacaagatctagagatctgagaaataactcctttctttgcagccctctctatgatagacactcaagaatgagagaaaatgtagggtcattcttttaggcatggtcatatcaattcaaaggaagacaaaatagtttaggaagtggattctaatgcaagagatagtttagaggaagaatggaaagtgacgttagtatagtttatgaggtagtggtttcagttgttaaatacagataaagagaacagaagaatataaatattctaaactgtatcagaaagaatcatggaactttaaaagcataaaggactttagagagacatcattttcgttcagtcctttcattttaaagaggaggaaactgacctttaaaaaggttaaatcacttgacccaggttgcacagagagttagtgaaaatagtgtctgtgggttcctatggtggggatagggaagaacatgtaagggaagaaaggaagtgggtctcttttcattctgatccagaaacgcaaatcctttaaaaggtaggcagacctttttaaaaaaacagctggcatcacctgcggagctgagccaaatgctgtggttggtacccagcctgagcctaaaaaaaatgctctttgtaaaatttctctttgtgcacggataaccttcacaaaattagttcatgcttgcttttaaattactttgcacctgtcctaatcatacctgaaggtggcaatgtcctaagagttacatagggtttgtaaaattgggctactggcattatttttaggagcactctgccttacttaatttggagaacattttttttcctactaatttcgatgccacatgctttataactcaactttaattttcctccaaagatatccaatttattatccttgtctttagtgtatatttgcttcaagagacagtctccacaatgctgattgggatatcatatgaattccataaattcattttgaagtccttggttttagcttataggatttctacattttgactcacttttcttatgtattttcttgatagttacccccctgcctaaacaatttaactcttccttttctttttttaacttagccacctccctaaatgcatgtatacattctctctctctttctctctcacacacgcacacacacacacacactctctctctctctcctccccttccccaccaccacacacataaaatcataaaagctgttttcccaaatggagaggtatgaagcatgtgagaggtctggagaagaccaggagtcataaatgtgcacaagccaacttaaaatatgttatgaaggcatcagcgagaatgtcagagtaggagactccaatagccttactctccactgaaaagcaaaaaacaaaacgaaacaaacaaacaaacaattctggcaaaactgtcagaaacaaagttactgaaattctggaaaatgggatgtctgtgaaattctgggatgttattagatcatggggcagatttcccctttggtattgttttcgtgagttatcaaagatctggttgtttaaaatgtgtagcacctcccccttctctctcttcctcctgctctggccctgtaagacgtgcctgcttccccttcacctactgccagtcaaaggtttgcagcaaccaagagaattcttaatcaagagaaagggccactgtaacccagtggaagaggtttatagtattttaatttatttgtgtccatccccaccattgctggcttaatggtggtcctgaagaaagcaccttgttctaccagtgtgggtcctggtaccagagggagcagaacagattttgttctgaaaaaactgtggttgcctgttttgacctatcaggtggtttcctgaaggactaacacaggggacttgcctttattttgcctaactcagaactctcccagggcacaaacatggctgcacagacagcatctatataaatacttaatagcaaatcaaccagccactgctacgcccatgagacaaagaatattagatgggataaacaataaacaaaacaaaaaacttgagaagaaggctgggaagtgagatgcttgggggagtaagggctttgagaagcttccacatattcccaggtatctagaaggtcacacacatgcgcagaacaggccacatgatcaaatgatcttgagaagatcctaaagtctcacctttgggtgaacttcagactctgtgaaagcaggaaatgaagttgaaggcagagttgtaaactgcttagctgagtgttaaaggcctgccccaacatacacacagagcccagttgcaaagactgagagagtttttgttttatccaggcatttaaggaaatctttgtcaaatcactagctgaccattgagttagtagaacagagatttcagtgaccacagaggataaaaaatactgtcagtaaaaaattagaaaagtcactaaacatacaagtacaacccaagacaagtagcaataacaaaaacttggggacaagaagaatcggatttccagttactataatatttaaaatgctcagttttaaacaaaaagatattagacttccaaaaaaaataataaagtgtggcccatttacagggaaaaaaagaaatgaatgtgaactgtccctgaggaatcctagacactagatttactagacaaagagattaaatcaactgtcttaaatatgtttaaagccatagacaaagaaccaaaggaatatatgaaaccaatgtctcaccaaataaagaaggcagaaatgatataaaggaaacaaattctggagctgaaatgtacaagtataatactgaaataaaaaaatctctagaaggtttctacagcacttttgagcaggtagaaaaaaagaatagaaaacatatagataaatcaattgaaattatccattctaaagaacagaaacaaaataaatgaagataaatgaacagaacctcagcaacctttgggatatcattaagcatatctacctatctagctatcggaatcccagaaagagaggagacagaataatggacaaaagaccaaataatggctcacagtatttctacattttggctcacttttcttatatattcttcttgatagttaccccctacctgaacaaatcgagtcttccttaaaaaaagacaaaaaaataaaaaaactagctacttccccaaatgcaaatttaataaaagaaataaatctacttattcaagaagcccaacaaataccaagtaagataaactccaacagatctaaactgacatattataatcaaaccatcaaaaaccaaagcaagaatcttgaaagaagcaagagagaagtaactcatcaggtacaagtgatcatcaataagaataatatcttatttaaactatagaagacttaagacagtgaaatgacttatttaaattgctgaaagagaagaactgtaaattaagacctatattaagcaaagctatcctttaaagatgaaggagaaatttagacattcacaaataaacaaaaggtgaaggagtttttcactaacagactggtactgtaagaaatgttaaagggagttcttcatattgaaacaaaaacacactagacaacaacttgcagctacatgaagaaataaaaatcaccagtaaaggtaactacataggtgaatataacaaacagtattattgtaatttcagtttgtaactcctcttctttttcctatgtcatttagaagacaaatgcataaatcaataattataaatttatgctaatggggacacaatgtgaaaacatggaatttgtgacaataacaacacaaacacatgggagagacctatattaaagcagagttttatatactattgaagctaagtgggtattaattcaaactcgattacttataaatgtaagatactaactgtaattccaaaagtaacctgaaagaacaagtgagaaatgttcagaaaagtaaatgagaagggaaccaaaagggattacaaaaggaaattaaattaataacaaaaatgtaactaatatgaaagacaataatggaggaattaaggaacaaaaaggttataagacatcagaaaacaaatagcaaaatggcataagtaagttctttgttagtagctactttaagtgtaaatgaattatactatccaattaaaaggcagagattagaaaatgatccaaatatatactgtctacatgagactcattttagatccaaagacacaaataggttgaaagttaaaggatagaaaaagatatttcatgcaaagagtaaaaaaagaaaaagctggagtggccacactaatatcatacaaaatgtactaagtcaaaagttgttataaaagaaaaagggaggcattatatattaataaaagggtcaatccctcaggaagatgtgacaattaaaagcatacatgcacctaacaactgagtcccaaaatatataaagcaaatttgacagaaatgaaggcagaataaacagctctacagtaatcataggagatttcaataccctattttcaataatggataaaataactatacagaaggtcaataagaaaataaatgacttcaatgatactgtaagccaactagacctaatagagaaatacagaacattctctggagctagatatggatgatggatatacaacactgtgaatatactaaatgccaatgaattgtataatttaaaatgtttaaaatggcacattttatgttatgtatattttatcacaataaaaaacgtttacctattgatatggtttggatctgtgtccccacggaaatctctgtcaaactgtaatcctcaatgttggaggtggggcctggtgggatgtcatttgatcatggcgcagatctcccctttggtgctgttctcatgatagtaagtgagttatcccaagatctggttgtttcaaatgtgtagcacctcccccttctttctcttcctcctgctctggccctgtaagatgtgcctgcgtccccttcacctactgccatgattgtaactttcctgaggcctctccagctatgcttcctgtacagcctgtggaaccatgagacaattaaacctcttttctttgtaaattatacaggctcaggtattttttttatagccgtgcaagagtggagtaatacagctatggacactcacaaggaaacaatgcattattagaagggattaaaaactatgatgaaaaaagagcaccaaattatttaacttaataaatccatcacttctacaaacacaagacaactgtagacatcccagttctgaggcaggagggtataagataaaagaagctgctaaaaattagtagtccatatgaaaataaaaacaaaagctaaaaagtggaaaaccatgaaaaagttttctgtgtgagaaagaaatgagattggggtacaaaggtactgctttttaaatgaagaattctaaaatgatttaaagctttaaactgtgtgaatgcctaacttgttttaacatcaactgatgtttaatattaatgcaaacatcaattaattaaacactccaacccctcaaatgtagtgtaggaaaaaccatactcacttcttaggctcagtattttcaaaatgattggatcacatccacgtctttctgaatgcattcagctacggtcacttagttctgcattggttttgtgtctgtcttaatagcaatcactccaaacctaatagtctcagtcacagctctcaagtatttttctcttttcccaaatcattctcattttattttgagaactatctcccttatagtaatctaggtttatgagtcattttcaaaatcacaaagtgctttatcattccactttttgaaaatctctagaatgtaagtattttggaaaaaatcttggtattttccaccttgtgagtctgctgatgggcagccagtaaagtcagtgctgttgaattaaaataggcaacacaacaagacaagggacattggtcatgcaagtcttatttcctgaggcacaagactttgaaatgagtcgtacaggttttacgatgatcaactctcagaggccaaggcccactaaactaactatatactaaaaaatgagccattgtaaaggaatattttcttgtaattttaaattaaactttttgggggtggtcttttataatttttaattttggtggtaatcctggagtttatttgcactatttttagtttttaactttttttttttatttttgagagttatgggaatgttagtgtttcaacctgtgatggtagaaaacacattttaaaataagacagacctgggtttgaattacaaagaacttctaagtcatgtaagcatagataaattagtgtcttttcttaccttcggttttcttctctataaaatgataatgtccagttttccttgttgtcatgaggattagaaataatacagataaaagagcaatcacggtatatgacaaagaacaggtgctcaaattggtggctttatatttatagttaaagcatagaagtattaaagtcctcatgcctcaattagaccagttcttacattttaccagaaaggaagctgagaatcaagaagagtgatctgacatacatcaataagataaagctagataattccagagattagtactgaggtttcctgcttaagcaacaatctcttccttcccttgggctctcttcactatggatgaagtctactatttaaaggaaagtttaaaataatttattgaacataggagaaagcatacctcagaatattcggaaatgtgacttagatgcaccttctgagattgaaacttgaccaaagatgacccacattttctgaagactttgccaatgtctgcttgttagtgacttggaaaaagtagatactgaatatgaaaagtacaatttcttcttgcccttcattaaaacaaaataaaaacatgttctttactccaagactaagtctgacctgctattatatttgataaattaaagttcttctaagattaaaaaaaatccctttagcaaattgttccagctaacatagtacccagcatacaataaacatttaataaatacttgttggatgaacaagtgaatgtgtacgttctcataatgctaatgagaagtaatgattaaaacaaaagtataaataagaatgacagaaacatcaagcattctgatgaggatctgggaggggggagtctgctatgagaacagcttgctcagacagagaaacaccaaacgacttcaaaaaaaaccacactgacttgagttctggcataactacctcactgcaggcaacaaaaattctgctttgcctttaatcaatgtaatgaaactgtgccttaacatgcttccttatttgcatatctcttgtaatccgtgttgcatacaatacaaaaagatttattataaagaaattaatatatcttgagaggccatccccatcaggcaaaagacccatctgaagataaaaatcacaccatttataaaaaccttagaaagatcttacaaatccatgaattatttacttaaaaacttaaacatccagagattgagttctcagctctcattggcaaatttgctcctctaaacatttcctaatgcacatgaaaactatttccctgagaatccagttctctaagtagtcgagttatagagtctattatagatataactaaagattctcaataacttttaaaaactaaattatgacatagtctgatgaagggtacatttcaccttataaactgcttcatattgtaattcaaattgtaattagactcttcacccctaaacagggatgttatccccacaagtttcactgtacacaaaactgaatcacattagcccaagccccggttacccttctcctaattagaatctttgcttctccccagtatgaatctcacaaggataccagaccaatctcattagaggcaccacagtatgatgtggtctttagaataagatatacatgggtgaaatgtggcttcactccattttatctgtgagctcttggatgaatctcttatctcccttatgtctcagtttccttacctgtaaaactgagataataccaatcttataaatttatgaaggagagtaaatgtgtgtgttgtctgtaaaaatcctggcatatgataagcacataataaatggcactggctattactatcatcatcttgtaacatactggtttctcatgtcacttcatacacaaaaaccacaataagatacccaggtcatatcaaattaaattcaatctcttctattgtgtttttaatgctttctatattctgaccagtttcatcttctctcccagaattccagagcataaattataactctggtcaatttagtttccttttaatctttttcacttagcatgtcaattcctgcatgtcaataatgttgctattattttctttcactttgcttgctccattatgccaggaccttcacattccttaagattttagatcatgtcccatccatttcctctatgaaacagactcttaatgacactagctcactgctttcttctctagcttctagggccaggtcccttagaggaactgggaaaggatggaatttctgtgtgatgtactcacatttttctctatgagagcctgctcttctttctatgtaatcctatcactttgagcatttattttacactgttatggaggccactagtgaatactaaagtaattttcttttccattgatgttactaggattatagtccaaagaaaggatgcatctatgtttatgcaaattaacttgatttcagctaagcttcttattggcacactgggttctctcctgcttcatgcaagataaaagaagtatcacaaaaatcttatgaactaactggtaaatataagttaaataatagcacagtgtatatactaacctcaaagaatattaataaatgggtctatacaaccaggaaagagatctttagttatatatcactggggtctgaaatgaaccaatgaccctttttctgttcattagagacaacatggggtagtgtggcaagtctcatatactaattcctgggttctactccacatactctgtagagtaaagcctagaaaacatatgaaaatgttccttgtatggttttggatgcaccagaaatcataaatatagtggtcaaactacatgcttcaaaaccaaagatctgaattcagagtttgtctctgtctttttgtttgtacgtgatgttgtacttacctgaacctcactatttcctcatgttgagtgttaagtgacatgatgtatgtatagtgtctcacatataacagacactcactaaataggaatcatttatctattatttggatgaatacccaaaagaaatgctcattgaacccactgttgtcacaccattaagaaagagaatgaatacaataaatgctaaaatgactttgagtctcgtactactaggccaaacacccataatattaacatggataagattactaagtggatttaggttgcaaaatcaattgcataagtaaaggataggagacctgcagaataataacagttgacaggggagaaaaaaaccacccagaagtttttattgactttaagttcagtaagagataagtatatgactcaaacaatctttgggataggaaatagaaagttgggagggtattagcatatccaacggtgtttgtaccttccacagctcttagtacagtagcttctttacagaaaaaacacaaaggcattataatgatgtgtgatgtcaataaaaggtcaatatgatcactgtattactattaataactaacagtatgatatctaatacttattgagtgcttattttaggcaatataatatgccaaatgttttgcatgtgttatttcctttaattgataaaacatttatctcaaaatctttgtaaataaccatttctttgaatccccaattttaaacccagacagtctgtgacctaagagagcggaattgctaaatcatgatactaactcccatttaataaggtgactgtgcttcaggtttcataattggtaagtggagattgggatagtgctagaattatttccttggctttgatgctaatttctctgtgcaattcactttaacaattacttcagatctgcaatttgaagtatttgcagtcttattcattgttttcctgccacaaatttattccttaaccaaagtttaggttcattctgttattttaatgcctttttagttgtcttttgactaaaaggtgagtaatactaatttgggagaatcatattattcagaattagataagcctcactgccctgcaaaaagaagctcacttctgtttgcttggctttctgatttggtggcctctgcatggagattcagatttcatttctcatttacatttgtcgttttgtcttctaatagtttgcccccttataataccatgtttgctaataactctgctttcatgctgtttgccaatgcagaagggaatatttttctttaatacattacatttcttccctccctacttaagaactatttacccagcttacaccatgtacctgtccatttatttggaatggtatatgttttgggatccttttatctcctttccatatttgaataattatagttattgatctctgtggcaaacctacccttcgtagtgttttatttatatcttttaccttttctcagtgaagagaaaaggatggaaattataataaaattattaaaatttataaaatccagggtctaatcagaggacagaaactacaataattgaacaggaaaagtttaatgtataaagaattagcaactacaacaggggattagaatattgagggattggtcagtaaggagtaaagggtactcttaaaatatacaggaataacagatataaggaacagccactactctagaactgatatagatgcccaacgaagacgcttgcctaccctgaaggctgagatctggaccttgtcagggagggcacagccatggcttgtggaatggcaggcactgaatagaatgctgtgccagcgtaagttgctgaagatctgcccttcagaactttatggaaatctgctctctagaatgccagggaaaactgtttataggcatgtgtctctctggagtctctcctctatgaaattgtccaaagtgggtgctgctgaccaccacgcactggcattgtgcgagcctgatggtgcagttgctgtttacactgaggagcctgctgagagagcatgccagcatcaggaaggaaaattccttcctcctgtgcttcaattgaccaagctgaacgttgtacacgctggcaaaggaaaatatttaaagggctcatctccatttttgcagaacaggcaatggagtataaatttgcagatgagatacaataacttgataactggtacaccaggtaacctgtatttaacaggaatcctggagggccatctggttcaatttcctatcttccagcagattgatgcctaagctatctaagacagatggttgttaatgctattaatatttaaacatgagttccctttaaaacctgctttactctttaaaaaccgaagccagttaagtctatacgtgtttactagagagaattttggaaatactaaaaaattataacagaaaactaaaataagctataattccagaatttagagaaaactaatgctagtattttggtccatattcttctagacttttttttttttggctactcatgtattcatttaaaacttatttagcatctattaggtctaggcacaatagtaattgttaggtgtacagtgacaaacctatcaaatgcctcctcgtcaactgagaatctagtgaaggaatcaaatacatctatttatgtatatataaatatgtataatacatgtatctatttataacactttttaataataaaattgggttcattttacatatgctgatttggattcagctttattcatttaacattatattaaaaatattttccatgttactataagtttttggaaagtgtcatttttttcatgactaaataattaaattttatcatttaaatatggtttgatttcccttttttctattgttaggcaactttttagcattttaaataatacactttgcattatacccatccctgcatgatagttaaccctgtggatataaccatgctcctgagtttaaatctcatctccagcatgggctgagtgatttagagaaaaaacacttaacttctctgacttcagtaagatcatagtacctgcctcatctgggtgttgggtggataaaataagtttaatatacagaaagcacctagaacgctgcctgagaacataagctatttaagtattagtattatactcatcatctgtttatgtgtctgtgtctccctgagatgtaattgccttggtggttttgcctactattatgtccctaacacataacacagtgtcttgtccatggtacaaaatttaatacttatttaataaattaggtgaaaaaaccctcatatataaatcacattactagttgaaagagtataaacatttttgaggatcttgatacttgctaaattacatttcagaaaagtatcaactcatattgtaactacaatacatgataagaatgcccttcttagcctgctcttagacattagatattacaactttttaatgttttctatttttttcataacatattgcattatactgctgctttaatttgtatttattcaattgctaatgaggtggaacatgtttttccaattgaatactattcttcaaattgtctattttctttcccaattttctactaacataaggatgtttttcttactaatttttaggaattccttttattgttaagatagttaccatttttttaatttttatataggttaacatttacttcttaattttcatacactgctttgtggcattcagctgatcttaatttttatgtagtaaaacatattgattattttctttataattagttgcatgattttattactagacattctcccccatgtagaagtcagtaaacacaagacccatacttcattcaatgttatttgaagttaactatttaatccattgaaatttattttaccccctctaaatagtgactattctcaatatcatttgtataattcattcttcccataacatgttgatgcttcccctataaaatatcatggtttttatatttagtagggtttttatattctattaagtttcataaatttctacattctactggtatctacaattttccaagtggtaagtttaattcattacattttcatatttagtagggtctttaaactctactactttccatggatatctagaccctactagtaccacagtttttaactggtaagtttaacacattctagtatcttgccgggaaaagttcctgcctgcccctcactgtgcatgtgtgtgcatgcatacacacacacacacacacacaggcacagaattctactccatcacacatcatccaaacaacaaatattatagaatgccctatatgtagtcaggaattgtgtcagatgacatgaatagaacaacaggtaaaactgacatagtcccatcccttatggagctaaaagaatgtggaggtagaactaaacaaacaagcagggaattctactacagataggctatcctagggcaagtagagtatgctatgagcagccactggtacagccatgggggagaaagaaaagcttgccacagaagatgaaatgaaactaaaatctaaagtgtgtgagatataaagagaaattggccaggcagaaacatcaagacaataatgaaataaagaaattgatctctctaccccattgttcttttcaaaattcttttaaatatatttcatccatttattcattcaagttgctctaatgatccagtatctcatttggtttggaagctcgggatgaaatattgctctgttatccaactttatgcatttcctctataattcaggcacttgatacaaactagtctactacttttatatctggtatctacccttaatgtacatgttagctcccattttcctacctttctctcttgttatatttagtaggatattttattatttaagtagatagtttcatactcattattctccagggttcattgcttactacctatgtggcttgaataaaaccataaataattactttctaaaaagattgaaagaaatatttgtagttaagtgtgccaagagcataaaaaatacagcttataaaaataatacaattattctttctataggagtgctgaggcttatgaaaatagtttcttattgttaaaaaagatataaaaaatgttcctttaaatgaatgatttccatatataatcagcttaacaatatctttaaaaattgtgttcatttacataggtaccactcacctcgtgtaacggggaatgcaaaatatgatgtcattaacccattttgaccaaatatgcctaaagaaaactaatgcttcaagtatcgatcaacatttaacagtatttttaatctttatatatttatttcaggcaggatactagttaatttagtgtaaaccacgtttaattatttctgtttattttatatatcctgatagtaatataaataccaattacactttttacagtcttgtttctctattctttccatggttttggtaaagtgttaatagtatttcattacatgttttcacttgcagggcttgctgtagaatacagctcagtttaaacagtcaattaattttagcagaactgaaattgaatgatgaaatatttctaggctgagaagaaaactacagtaaactcttagcttttctactttgaattggaatttttgctctttttcacttctcagagaatacctaatcccgactaaataattaactgactggcagcaaaatgcattaattgtggagaacagtaagctgggtttgacatccatctttgtcactaacagaatctcatcatggcaagagtcacttaatgtcttcaggtcacactattttattatttgtgaaatgaattaataggattacagactcttcaaagtccttactacctctaaaatgttaaaattctgactctaccttgtacataaaaagaaccagtaattccagtgtgagtgcaggggtttctaaaggccaaatatcgaatactaaataatatactatacataattgcatgatttgttcacaactattcatcccctccctcatcacagcttctctgtggacaaagtatattccctgaccactgattttgggctggtccctgtgatttgctttgacttatgaaatattgtgaaagagacagtgtggtaatcccaagaaaggctttaagaagtgctacatgcttctcatcactttcttaagattatgtcctctttcataagcacagcatgtacaaaatagtggttttcttgagcctgggtctctcaatgaaaagatgtgtggaatagaacaactgacccacgccaagctgaacctagtctgagccacttgcaaacttgtgggcaagaaataaatctttgttgttgtaagccattaagattttgcggtttactggagatcattctgttaagtgaaacacgccaggcacataaaaacaaacacacattctcacttatttgtgggatctaaaaattaaaacaattgaactcatgcatataaagactagaaggatggttaccagaggctgggaagggtagctgggggactgcggggaggtggggatggttaatgggtacaaaaaataatagaaagtatgaagaagacctactatttgacagcacagcagggtgactatagggtgactacagtcaacaacaacttaattgtgcatttaaaaataactaaaagagtgtaattggattgtttgtacacaaagaataaatgcttgaagggatggatacctcattctttatgatgtaattatttcccattgcatgactgtatcaaagcatcacatgtacccccataaataatatatacctactatgtaaccacaaacattaaaaataaaaaaaattaaaatattttgtggtttgtcatcacagaaaaagttgacgaatcaagtactaggtgtactttttagaaaactgataaaaacaaactatttttgaaagtctcatttcaaacgctttattaagtaactccttattatcagggcttttgttccttccttgatgcctggtattgtactgtatcacctaaattaaacataggaaagaagagaaggaaaagtatgttgaatgggaagttaataatgtgtctctaaagctatttctcagaattagtaagtgttcagagtacaaacagatgagaagtttggagtcaaccttctagcagtgttgtcaatatatcatcaatatgatatggttaataaactagctttaatatgattcagtgaatcttgtctgtttctttaaatttgaatatctatatggcattttcaaattgattgaataaatgtattattaaaacctctaaaatcacataatcattgggataactcgtgatttgtttacactttgtaatagcacactgggggtgggggaaatgatgaacatttgaccacatttaatttcaaaggaaaaatttgaatatattttctgttcgcatttccttaacattcacataagtaattaagatgactaaatacttatatcagtacatgaaagcatctatggaaattccaaatgccaggaagaaagtgaagcaaaacatatatgccatgtaggaagataattatacattttaaaagtacattatcaatccaaaataattatgaagaaaatcctaataatcgacttcattgtagacaatatcctaacacatcataaggacattgcacagcttagtgaaatgagatagcatattgctaaaatctattggtgtcttaaaaagtggaggggattttatgacaactataaccttagcaattttatctatacctataaaataacttgatataataaaaccttatactcaccgccaacattagacgagttaaaatttcctgtcagtctgctgagagacttcattatacattatctttacatatattatctcatatccaatcttcataagaaagatcctacgagaggggttctgtcattgtccttactttatagataaggcaactgaggtttagaaacataaaatacattgcccaaactaagtggctaaaggtcagaaaatatgacttaagaatttaaattcttcatgttaaagtgtgcctaataaatggaagagatgaaaaagtccttcaggtcataagcttaatttgaagatattaaatgtctgtcatatccaaagttacatagatggaagcagaaattaaacaagaacttgaattttttattacggtatcttaacacattttactatatatttataaaaatatctgctataaagttcttgaaattttatttccaagcatgtattttacctgcaaagtttcagggtgatttttatagtcccatatcttaataaacgcagtcaagttatctgctaatttttacattttctcctctgaagacagctcaacaacctctaaaagatacattttatcccagtagggggtctaggagcatggaaataattaagttttaaaatgtctttgttattttattcatatttgatgacttaattaagggaattatgagataaatacccaaagcaagttgatcttaagagtaaataattattatttccactagggtcgaattgcacatctcagtgatgtttaaaaattattgtaacatggaggatggttatagatatcctattaaattgtcaaacatattgcaaagattaggcaaatttttttcattacctcattatggttaatgcagataaaagactccttcctctacttagcctataaaaaaatgcttagaaactaaatgtttagaagacttcacaaattccacttttagtaaaaaagacaagtgatagaataggaaggtaaaacttaaaggagaaactagaaactaggcagtaaaggaagggagaaattatagaagaaattatttcccttaataacaaatatttcaataaaatgtatttagtaaaatctttaacagacttgttcattattttaccattgacttaagtaaaaaagcagatgaaatgctatgattaacaaatgacatgatgccaaaggaaataaataatacagcgtataagtgatacaggctaccaagaaatttaataaggtgaaatttagaagtaataaagacaacattttgcattgagatgaaaaatagtcagcattccagcagaggcagatttaccacacaggtcatgaagcttaagcttcaggacccttgatttacaccaacacctttcagagcctgtacctaatgtatatatgataatcctattattaaaggggacctctaaaattatataagcttccgacctccaaaaacctgactatgcctttaagttttaattccaataggataatacaaactatttaactctgaatccaacaaacctttatgcaacaaacctttcagatcaaacaaggacaaataaaatcaccataacccataccagagcatatcttagagacagaagccaacttacatgtaaacgggagatatattcatttgagaccaccaaagttggctccagagcccttaccttagtgagatggaggggacttgtatatataagaggaaaactaggcatgtttccaaatagatacaattagcctccctctcaccaaggggagggctctgaagccagctttggaggtcttaaatgaatatctctcccacttacatgtaaattgacttctgtctccaagaatgcccccaaaaggagagagtccaatcagtaccacccttaaagtttgtaagatcctgggcaaatattttattttttgcaggactcctgtctatataaacagtttgattaaagatgtactgcaaattcatggactcatgcaaagtacagtgatttattaatgaagagttagaataatgagtagacaagcagtatatatatatttgtttattgtacatgtttattgtacaatcagtgcacatgaagattctttgtagtgtctgattactgcctatttctgttcagatccagaaaccataccttcatgttccctattgtcatatgtcccatgcctaactacttccgcatctcccatctgagaaaaatgtagcaatgctattattgttactgccatagctctttggaaactgtgtgtatttaagcaacacagaccattttgtacctgtagttctctaatatcatttacttaatgctgtacataattactcatgacactgcatcatctatcatgcaccctgtggattctgacttcggtgactctcttgaaggttgttatggcattgatggtcatgaacgcaagtcattcccagagtatttcagataatgtgaatgatggtttgttttctggtcatgtttttactgatggtagttttatatcataaacttatcttccaaccatgtgtttcctcaactatttagatcaaaaccactgcattactgattgcattgctgactgcttttgattattgctatactcccaccttccacaaactgccaccaatgaggaagatagacaagggtcctaggggcagtgagagaagagactttctatttctgtaaatgaatgtccattgttcattcagcatggcttagaattggtccccccaccccaaagaacacaatatcactgcatcaattgtagaatactgattgaaaggatccactggccatgctgagcaacaatctagaagagtcttaccggaaaacagaatgatcattcccagaggactgcttgacatgtggcatggagcctgcagagggattggggtaagcatcttgggtgccagtggctgggagtacattgggttgaggatacctcctgcagctcctgccgcccacaagggctgcccacatgggcagacacacaccagtgagcattaacacagaggcccaaagctcaagcccaaaggtcagtgacaaatagttggtagcccagagctctgaaactcatcctatgtcagacattgagtcacccaagtacatatatcagcacaatctgatagaccaatttcatgtgatcccacaaaagaaatactgtggtagccagcaggagggatccactagccaggctgctctcctgaaatcaaggctggccatgggtcctgggacaactcagaagggtgtgagccccagagttcttacaggtcaggtggatgattccgggtatagagagtggagagttgtagagtgcctcaaaggtaagaaataggaacccgggcccatatggatggatcagggcccttaaggcacagggcctgaggcaaaaactacacttccctgggcctaagggtggttctgggtccaattctaaatgagaaagtattcagaacaggtctgatccctggggatcagagtgctgaatgctggggagtcagaagcaacttagcgggcaagaccagaagtggcggtctctatcaggtacctcttctgatggagaagggggcactctaaatattaatagtacaagagttccttggaggtttgattacaaaggagaagaaagaagttgcttaaaatagggtcgtactgaaacaaaattgtataaaaaaataagaaaagaaagagaataataaaaatcaacaaatgaaaaaataaacaattttttacatcctttacatgtcaacagaagtagcccttggactaagaaaatcagcgtcactggacctggatctatttgccctaagagctcatcttttctcttcttctgttctctgtattacagggggcagccccctctggactgtgtttctctagactcccaaatcagccgggctctgggtgggcttgaacagccatttagaagcacttgtgcaagactggaaggtgttaggaagggagaagtcaggggtatttctctccctttctttctgccttgggaagtatctccattgatgactgtcccttttttatggttccattatttccttggttttcttggttcccgggctctgataaccaccatttccttttgtctctcagcctcaggacactaatggcttcttgcttttgctagcctgtaggtcacctcgctgcccccagtatggctcctctattatttcatcatctgtgtaactaactctctgctttatatccctgtgttgtaaacctctataattaaaacagtgtggtattggcccatgaatagacagaaggatgatgaaacaaatagaaagtccagaaatagacccaggtatatatagaaattgggtatatgacaaagttggcatctcaaatcgctgggaggaaagatgatctttagaataagtgatattggttcagcttgatagacatttggaaaaagtaaaaaaaattgaattctatcttatacattatctcaagattaattttacataaatgtaaaaaataaaaccatataagatctagaggaaaacacagtgaaatcccttatatcctaagagtgagggagcctttctaactatgactcaaaatacggaagcaataatggaaaagattgagaaattcaactacttaaaaaaaagaaatggccaaaaaaaatcatcataaacaaaatcagaggacaaatcacaaaccagatgaaaatattgcaacttatatcacaggagaaggtctaatccagtgtttctaaagctcagcactactgacatttggggatggataattctttgttatgggggctgttttctgcactgcagggcattcggcagtacttttggcctctacctactaaatgccaatagcacccctttcccaggtgtgacaaccaaaaatacttccagacattgccaaaaaacgtggggagaggagtgaggagggaggcaaaatcatccccagctggggaccactagtctgttctaatatataaaaagatcttaaaatagtgaaggaaaaattcaaaatccgaatagaaaattgggcaaaagacgtgggcatttcataaaaagaagagaaatggcccctgagcacctaaaagattgcttaatctcactcatactaagaaaaatgcaaatgaatgctattctgagagatttcttacctagcagattggcacacatccaaacatttgaaagaagtctgtgagctacacattactgatggaagtgcaaaatggcaaaagctctttgaaagagaattaatcggtattttaaaaaattatattcagattttcttttgacctaggaaccccacttctatgaatattccccaagagagagagttccaggagaacaaaccaacatatgtacaaggttacttactgctgtaaaaggctgcaagtaattcagatttccatcaatagcaataatggaataaacaatgacatactacccaatgaaataccataatgcagaccttaaaggaagtgaagactgtctttatgtattgataagaagtaatggtcagaatgtattaagtggaaaattcaaggttcagagcagagtatgtgtgtgtgcttgtgtgtgtgtgtgtgtgtgttgtaaaaagaaaattcttaaaaatgataacatagcggatgaatgggaggaataaagtagggaatagatggaaagaagaattttctgagtacacctttttatataattttgacatctgaactatgtaaatgccttatataattttacaaatgaaaatagaaaagttaaatcctaaaattaaaaggaaaccagaataaataagcctaactctattttaaattagtaatacgactcggagagaaaattatttcaagtgacttttggcaaagcattctgattatatttttatgactacaattttaggatatactgtaagcacaaaaagtgattcaaataaattttaaatttcactcaatagttttgttgtattggggacacatgaatgtaaagatgggaacaacagatactcgagactactagaggaggagggtggaagggggcaaaggttgaataactacccactggatactatgttcacgacctaggtgacaggatcaatcatatcccaatcctgagcattatgcaatatagccatgtaacaaacctgcacatgtaccccatgaatctaatataaaagttaaaatttagaaaaaaataaaataattaaaaagtatttaaaaatagttttgttctcattagaacctactttatatgctaggataaaacaaacatgaatgtcttagaaactaagattttcattataaaagaaaagagacaatataagatcaaagttagaaacttataatattaaaatttaatcaaaatccttcatatgcagtaagtattatatatgcattatagatgtataaaatatatgcgtattttttcttgcactatctgttgtcatttattgtaaaacactgaacatataaaaattcacaattttacagtggttgagaaaagaaaacggaaaagaaaaaagaataagatgaagagagtgatagagagacacacgactatcaaagctcactaataaaccaacttttcactctaaaatttgacaattaaaaaaataattcagaatatcgcacctttttgggaaaagctgtcgccaatacccattttattttggaaagctctttataagagattaacagccaataaacgtagaaggaataatattattagagaatcagaattttgcaatcccaatgaaaccactgttcccatcaaggatcatcaaagaatgataaacccttacgtgaaagttcactggggaatacctgatgtcattcccaacagttcatttaccccacagtttacttgctaattgcaaagggcaaacagaccttgcaatgaagtgatctagtagtaaccaccctaaaagtgataaaatttagcatgaccaatagagcgaagcctgatattttatgcttcctaatgtgatgcaatataaggtactcagaatcacctatgaagtaccatactcttgccaaatgcttaagctagatgtgcccaagactttggacctaatatccaggttataaaaagtacaggtataaaaggacaagttaaacaatcagacaaatatagaatgtgatatattttacaagacaattgtcatcatctcaacaaaaagtcagtatcacaaaaataaatgttggtggactgttctagacttaaagaaacttgagtgatgtaacaatcaaattaaataagtgaactctggatcctggtttgaaaaagcagctgcaaggtcattttggggaaaattggataaattagatagacagatgctagatgaaataggctgattagatatcacttgattaagaaattataattttctcagtgtgcaaggtattacggttaagagaatgctcttttctatatgtatactgaaatatttaggagtaacattatctccagaatttattttcaaatttttcagcaagcaagatagaaagatagataaatagacagatagataaatggatagaaagatagatagatagatagatagatagatagatagatagatagatggacggacggacagacggacggacggacagacggacggatagacagacagacagagacagatagatagatagatagatagatagatagatagatagatagataaaatatggcaaatgttaactcttgaatgtaggttgttgggtgatgggcatacgttaattacactgttctttcaacttgactgtttgaaaattttagttaaaaaatgtggtgaagaacattgtacaaatataggatgagatacgatagaacataaagaagacccttataagtgtgtaggagattagtggggcatgattgttattcttagattacttaaggaggcacaaaaaattagtcttcagcagctaacggcatagatatgatagggttgcactagatccaccttctagggccaaaaaggcactggtggagctgtctcagctgtcagtgctaacaacaaagttgattagacaaagatctatggatctagagtgcttggccatgacttaaaaaatagagagcatttaggggaaatattggcagggatagcctgcctcagctattattgttatggcttatggaacatgatgatgggtacagcaccaagaaatcctgtcatcatggacctacaaacagtaaggatttaggctgagttttagcaaagggaataaagaaagcagctagaaacccaagaaggccagtggatccagatgagttactagaatctctttaaaagacaggcaacagacacacagacatgcaatgaattcaataaaaattatatagtcacagcacattttcccagtctcaggaggtttttgccctctggatggaaggtaattgtttgttaataagtacctggcttcactacacatacactagtttcagggtgaaatattactttaattaactagttgaaatttcacaggtctagaatttaattacctgttggaactgtagctaagatatcatggtctcataaaattttactgccttttaaaaatgaccataatttatcagaatcttgggggaaattgtgcattgtgcatgaaaacaacaaacattggaatatagttagtcctaagattgaagaagagacttacaagtacttcgatgcactctactgaagttcagatgagaggacagattctgtttcagtgacaaagacaaactgggtttcatattcactgttgtcttcaccttctgctatagagtttctgggttttttgtttgtttttgtttctgttttgtttttttttcttgctaggctccctcaaatcatgggacagtttctggttttggaccccaaggaaaatctgaaggtagatgaagttgtcctttgtcaaactacccctgctttttttgtgtgtgtgttagctcactttgtatggcatttagagcctgtatgtcctaatctatttcttcattatgcaaagcattgaatagtttcccagattctaattgtccttgtctaggtagcatgtgtaccagggtattatattttactgtatgttgtctctacacatgccgcaccagattaggctcccaggaagccctaaactcttggtgatagtttgatggaggaaggagagtaggatgaagcctttcctagtccctgagctttagtgatctctgtaaacgcacaatttaagagataagacatgtgagaagaagggtaggattaaagatctgatgaattagttgctaatctatttcttaggcaagtaaatttatccctcttggtatgtgtcaacttgtctaggtcacagtacccagtatacacatgtgcacacacacacacacacatatacatactgagagagagagagagaatttactggttttgtatctctgaaaaagcctaatacaatgtactccctcatctgtgagaaccttccaaattcttcagttttacaatttcatatctaaagaacaggtctttgttgctaaattactgcctgaaaatagttaagctctaattattaaggaaaaaaacattcctgtgaaaaatattttctttccacttataatgcaaaggtaaacttcaccagtatataataagaataaattattaataaatggcacctgtactaataataatgctttactatttgttaaaatattccatagtactgaagacatttaactacgttagtaaatgacccaaactaacactattattatttctttaaaattggtgacacagagggatgactaggcaaagcatagaggattttcagggcagtgaaatattctatatgataccacaatgatggatacatgtctacttacatatttgtgtaaacccatagaatgtacaacaccaagagtgaactctactgtaactatggagtttgggtaataatggtgtgttaatgtaggttcatcatttgcaacacatgtaccactctagtgggggatgttcatgatgggggaggctgtgcacttgtggggagtagggaaatatgggaaatctctgtaccttccactcaattttgctgtgaacctaaaaagaaaaaatatgtcttaaaaaaaaaactaatgacccaagtgtgaataaaacatggattacatagaacttaagggtttaaaatcaacttgcaccatactgaaaccacttagggttcttatcatgctgtgtttcttatgattcgtttgtaattagtcagaatatactgcagctgtttgtgatttcagggaagaataagatgtttataaagagaaaatgttccattatctctgctttttaaaattcctttctttgtaaatgatattttatgatatgttttccatcctcatttcaaatcctaaacaagactgttaaataggggtttgtcatacatagaaaaattgctacatattagcttctttccccacttcctcccctagttttatacatccatacacacactcacgcacattatttttatatgcgacaatttctggctctgcataaaatgttactgcaaaagtacactgtgtcaagttttttcagctgcttacattcctactctggtaccagtgccagggtttcagggcactacaatttcctttatatctcagtggttattttgaaattatcatgtctcatctgcactccctcataatgtatgccttccatgtcatattaagctgcactcttttccctgccttaattccctaatttctggaatgatattggaattggttatgattaaaacagcaagggtctatattaaaagcaagtatcttcctcatagatagatcatgaaagtttgaggtaccatgaaatatgatgtgaaaatcaccttcttcaaatatccaagaagatcactagtaaatttcaagtgtaggttcatttttacatatatcttacttacccctggagttccatagcagaggtggtagtgaacttgaccactagtgagaaataagaggaactatggggtaattgttcccaaggaaagggcaggaataggccattatgtgcatgtaactgtaaagagtcagtagatgcatcaagaggtatcgtatgacaattggaagatacagaaataaattcccagggtttcaagataattgggagaggaaaaaaggaaagacagtgtggtggacatcttttgtttttgcttgactagaatcctccttcattagtaacagcatctgagaaactatcccttccctattagacgggtaagagtctcagttgcaatggcccatcctcccctgaccaagaatgtagatttggtccaatacaggcaagtcagacacttcatgggatatgaatctttaactgaacaacacaaaggctgaaattttttccagctgatttatctcaatgatggtgttttaaagagactttttcattagtttcttctccctagatatccctagttgctccagttactgctctttttgaatacttgtttcattttttgttttttttttaaatcctgcttacattagttgcatgcaatcttacaagcttaactgacaaatcattaccaacaaattagatttctttagtgacttggcgaaagtgagaaagaaaactacctttgagaaagggtggactggattaaagaatgaaaactttcagccaaatagtagagaactttgcctaagaatgacttagaactttggtccacttcaaggaaaggaaactaagccagaatgtaaatcaatgcattgcttctttcattgagaaagtcatgtaacaaaaaaaacaccagctgaactaacctggatgcttagtgatgtatttggatttacaccatgctgccagttccttacaatttcagtctcagtaaccctgatctagcttaggttgttttaatccaaagaatgtgctgattgagactttttattggaataactagaatttgacacatgatttccagaagtatagaggttcccagaaaatacataaatgaatggaaagaatagtacagcaggcccttgaataatgttgtttcattcaaatgtcatttcattataatgttggtgaggaaaaaaaaatctattcccagttagagccactgtctgtgtggagtttgcaggttttccccgtgtctggatggattttctctgggtattctggtttcctcccacatcccagagatgcacatgttaggtgaactggtgtgtctacagggtcccaggctgagtgagtgtaggtgttaatatgagtgtaccccgtgaagggacagcatcctgtccagggtgcattcccatcttgtaccctgagctgcaaagataggctccgaaataatagagtaaataattgtctggcttgtttttattaatcttaaatgtatgtatagttcacatttatttcaatgtttaatatgggaagtgttttggtctttattcagaagtttggtgatgttttagtaaccagaaatatgccatagaagctacaattttctagctgaacaaattacagcaatataagctttcttatggttatcttaaaagatcttatggttatctaaaagatcttaaatcacacatcttctttgtgtttctggtatgccaagttttgttgtttatgggtttcaatgtgaatttgtttacttatttattttatttttttacctaagatccaggaactatagatcaatgtaaattaaataaaaaattgacttggattcttgtccttgattaaactgcaattcatgtgtttttgaatttttaaaagtaaattttctgttgtaaagtaataatgacggctacctcccaatgggacacattctgttttctagagtcaatgaattcaagtccacttggagtctatgagtttggatcaccttatcttaaaggctacttggtgaacagagttgaagttttaagataatccgttagttgagttaaaaaagcacttgggtatatcagggcttcttaacttcagcactactgacatcctagagctagataattctttgctgtggacagttctgtacattgtaggatgttttcagcagccctggtctgtatccctagatgccagtagcaatcttccttaattgcccaatatgccctgggaggaaggggtaaaatcaccccaagttgagaaccactggtgtatatcattgctataagggcattggtttttaaacctgacaaagctgagctcacctctcaggtctgtccctttcttacgttgatttgggaaagttactattttccttgtctgagaaatgttgatatctcctgggaattcttgaagagattagaaaatgtacttagcttcatgactcacctatagtaaaaactcaacaaagtaatcattgttagtaatagtatcataattcctaaatcctaaatacagattttctgatctaaatgtgcaaataataactaatcaaatttccaactgtgttatttgacaaaggtataatgaactaaaactctaagacatgttaaaaaaaaaaccctaaatacaataatttctaaatgggacaaaggctttatagctaactctttgaacttgaaactattttcagaaaaatgactggagtaatgttgctttccatacataactgttgaggaaatgtactaacacagacgagatcaaactgaaaaagaattatatgtccaatgttctagtcctagaaagaatacacacacttcctctctcttcctctaaatccatagatgttagcagtgaaagatactaagaaaatgaagaactagaacgtggaatattgtcacatggaactaacataagaagtaaaatgtaaatgaaggaattttatacatgtgcatttcaaatgatctcgaccacaaaatcagagaaatgacagacgaatacatgaattatcaaaccattcgctgttcaaaaataaacttctgaactttagtgtttgcttaatggaaagttctttcttttctttactcagttatgacctcagacatgcatcagaactcaatgcatatgataaaacattatcatgccaactctgtggatacgaaaaaaaatgcatgagtggagtgacatttaaaatgctgatttaaattccttagcataaatttcaaccatctgggaattttatttgctttcctcttggatcctgttgcacactcaggtgagcatagctgttatccataaacgaacagttgttttgaaggggcagttgtacagtctctttaataccaagttcactttatctggggtgttcagatagtgctttcattttcaggtttgtggaaaggtgaagagacaaaaagctcaaatgctttgttaggaaatgctgctgaggaaaggaatcctgattattgctttgaacttcaaagtatatcagtaacagggtctcttaaaaggaagtctcttgagagttcagattacagtgaataatcttagaaatgttcctgatgaaattaaattgcatggttcaagtaatgggctactctcccatatgagccttgccatgattaaaactgctttaacactaaatcgcacatggatgccttgtaaatacaagatatttaacaaatatttctcttgatgacagtctcatctcacctcatttcagcaaattaaagtaagttgccacggctttaaagaagtcacacagctagttaattgcaccgtttgtccaggaaactcattctcctgaatcaatcccagtacagctctgggttggattgattaaatcatggatacattgattgttttaatgaaaaaagtttacatgttcatttaatctaagacaacctgcaccttacacacacacacacacaccccacccacacacctatcttttttttttttgagatggagtctcgctctgtcgccaggctgaagtgccgtggtgcgatcttggcccactgcaacttccgcctcccaggttcaagcgattctcctgcctcagcctcccaagtagctgggactacagtcgcgcgtgaccaggcccagctaatttttgtatttttaggagagacggggtttcaccatgttggccaggatggtctctatctcttgacctcgtgatctgcccgcctcagcctcccaaagtggtggattatgggtgtgagcctgagttaactaaaatgttgaaaagttaagggaattggtcattattcttcagcatatcattcttgaacaaaatgcggtttctattatactctggcttttgtggggctagcagtatctgaagaaacactgcagaaaacattgtagacagttttatttcctaggaacatcagtaagatttccacaatataaaaacttaaaaaaatattcagagcaaaaataattaaactaccataaaagtgttctttgccaacgaattgtgactagtacaaagcattcagtcataataaatcttttaagcttttcaaaagcaactccagaagctaagtttcaaaatttgtttagacaaaagcaaatttttaagaaaaagagtgtatattttcttcaagctacattgaaggcatttgcatgtttaagtaccagtgaaccatttgtttatgtttaaaaatgtttaatcacgttagtgtttttttagtttgattttattttccaaagatggctacaacaatatctcccatcccatactttcttctagaatcttgtaaatttcccattaagaaatacaatctgattcctgcccccttaaacctggacaggtttgtgacttgcttgtaacaacaatacaagatttcccaagctaggtcagaaaaggtagtacaactttcaccttatagatggaatactcaggccattcctagcctttccagatggcaaacaattctttaattaaaagagagcctcaagtcaaagatcaaatccagggtgggactataagatcatttgtgaagacttcaaaaagatctaaggctatacctcatagatcatttaagaaccacaaaaggctctctgaggatcttaaaaacatgcctcataggtcctccctgttaaacaatatagggtttctaagtatctaaggaagtgtctttcatcagacttacagggaacacaaaatagagaatggattatcttaaagagatttgtgactgtggcttttgtttaatggactgaaacccaatgagattcatagaaaatccacgaagttcttaagaattgtgttgctgaaaacactgccagtttaaaagagaaggccgggcatggtggctcatgcctgtaatcccagcactttgggaggacgaggtgggcagatcatgaggtcaagagatcgagaccatcctggccaacatggtgaaaccctgcctctactaaaaatacaaaaaattagctgggcgtggtgacatgcacctgtagtctcagctacccaggaggctgaggcaggagaattgcttgaacctgggaggcggaggttgcagtgagccgagatcacgcactgcactccagcctggcaacggagtgagactccatctcaaaaaaaaaaaaaaaaaaaaagaaaaagaaaagaaaaagagacagtacaaaatgaaaggaagcctctgaattctagaactgctataggcaggaagcaaactgagaagatttagttttatgcataggtcacttattataacaataaagaaaagattactcaaagaaagtaagactccagagggcagagccaaaagtcgtggccaactctcagagagtagaaccaaaccctactgacaaaactggcaacacgtacctggctggacttcagaatttctattggccagtgacttctatgtacctatactcttccatccatttgtaatggaagcatctattgtggttaacctatgcgtctggcctttacatgatggatatgtgggaggcaccaagaggaacagtacttgaatgctttgcttaaggaaactgacttaaggagactcaactgcaaaaggacctaacttaattagagaaataaaaggtttgcttctcgaggtctatttacagactaagaattacaaaataaaagatctagtgtatgtggattaataattttaataagcgaaagtggtatgtactttctaaagtatatcacaaatgtgatataaagagataattgagaggcagaataatgtgttggtcaaagtgcaagccctgaatcagaatggatggaatcaaatcatggctccactcacctctagttctatcaatgaaggcaagtcagttatatgctctgtgctttcatcccccatttgtaaatcagacatgacaatagtacttacctagggttgttgtgagaattaaattagtgagaatatgcaaaacatttagaaaagttcttaataattatagagataatttacctacaaaaatctaattgacaatgatgacttttattgctgaaaggaaggaaacttttaactcctctcaaattactgggagttcaaaaatgaatcttgttgagtgaagaaaattgctacagaagactttggaagtgattacacaagtacaacatagtaaagctagaatcttctgccacttgtcaaaataaactaaaaatagatgaagaataataaacactaagttgtgaatcctagtgtctacttacgataatttaatgacaataaatctaggcagatctactgggttatgctaagacattttcctagctgtatctaatttgattgactttttctgtttaattagtgaatattataattatgtgttctgaaagttgtatgaatttcataccatcaaatagcactaatgcaaaatagagcaaaatatcaagacttagagtctcttttgtgaacttgccttcttgcaaagaatatagttaactccctggagtaatccttatttgtctacataatgaatgctgtgggaaaatgaggcacttccactcttgttctcatcggcattgatatgaccttgtctgatttagttgaaccaagggcattttcaataattacaagctcagaggtctaccacagatcctctcatgggaggattacttaatgtaggcaaagtagatacaacccttcatgtctggtccattttaatttattggttgcctaaatattcaatcagagctttcaccagctatatttgtagagctgctcaaatgtttttataaaagtaagcacatagaaattacaaacggtgcttcttttcattcttgcaggctgacacctacaaaatatattttgttaggttataaatagttaaaaaacttttttgagctacaatgcttttaattgcttaattttgtagtttttagaaacatgttctagaaatatttaggaaacaatatcacatcctgtggcatcaagaaaggcaggaactttgtttttctaattaataaagaaggctaaaaagagtcagttgttaaataggcaatgggaaaccataattgtaatccatgggaaccacggatttttgctggaatataaaggatgatttaaaattagcttaagatttcactgattcttaatgtattttgttgatatattgattagaaaaaaattacatttagccacacctaaacttattttggcttgtttatcaaattttcagattaattcttgttgatcagtttcctttcctccttccttccttccttccttccttccttccttccttccttccttcctttctcatgctccacaacaaacatttgttaggcaacagttcatttactaacaccataataggtgctagagattccagtagaaatcataatctctgtcaccatgaagttcatgaatttacaataaaaacaaaaccaattaacaaaggtgggccccgaattcaatgactggcctccttataagaagaggagaggatacagagacccagagaagaaggccatgagaaaacagaggcagagattgaaattatgctgccacaagaggaggaacacctggaagctggaagaggcaagaaaggattctttcctagtgcatttggagggagcatggtcttgctgactccttgatttcagacttctaggctccagacttgtgagagaataaatttctgttgtatcaagccacccagtttgtggtactttttgtggcatccttaagaaacgaatacagacatgttcactttgaagtacctttgggacaactgagtcgaatggtcaaaagaaagatgaattcagggatttggaattccagcttaggctggagataaaactttgaggattatcagtatgcgatttggcaataaagccatataagtggctaagatcatccaacgcactgtgtagaatgagacaagaattccatctagggccatgaagaacagtaccttttaggaagagaccaaggtggaggtgctcacaaagggagactggagaggtagaaggaagaccaggatagtggaggggcacatgcagagggtttcaagggttaagtgcagcagactggtcaagtaaaataaagactttgtccgttgcatttaggaaaaggcagttgtggtgacctaactgagacttcagtgcaagagtggagtaattttcaggaatgactgagagatccaaaagtgagtccaggaagtgtagacagctctttccaggggattgaatgtgaaaggtggaaaaccgactgcaactagaagcaaagaatgaagaagacctttcacattgcttaattgtcactatttggattttcttacagatgattatgctcttaactaatgagacactttgatgtttagacaatgatgataaaacaaaacagtacctcattttaattgttgttgtccacaaaactgctcactaaattatggcaaagcaactagaacatgttttacagatacaaatctaaaaagtcagtaaatgagaatctgttgttggtagaaattttctgcataatttacaaagagggaaattataggcagaataatgttttgaaatgcaaaacatctgactcatagtagagatgaagagcagtgaatgacccatgagagaaacttatcttattgttcacacacagggtagagaaaattcaaaccgataaggcatcaggcaaagcaaaactgctttaacgaaggtgagtcataatgccactcagggagatgaatcaggtgcccacatgtccaatcactttcataattacagctccctacatcttttaaattaaaactgaagtcaggtaacaactaatgtccctttagaacaaacttagccaaatggaaatagacagagtcctaagaagtaaaatgagcatatcaaagagatgcagcttttctggaaaggaaaaaaagaaagaggggcagtggctcacacgtgtaatcccagcactttgggaggccaaggtgggtagatcacttgaggccaggaattcgagaccagtcaacatggcaaaaccctgtctctaccaaaaagacaaaaattagccgttcatagtggcacatgcctgtagtcccagctgctccagaggctgaggcacaagaatcacttgaacttgggagatggagtttgcagtgacctgagatcataccactgcactccagcctgggttgcagagtgggactctgtattaaaaaaaaaaaaaaaaaaaaagagagagagagagagagcttgcacaaaagcaagccatccctttaagtgtaatgtcatgactgctggccccaaaagacttttaaatgcttttattgtgccctctgttccaactgattttgataccttcccatcatggaatcactacagtagtttttgctcaacatgaagtcttagatatattatacctgaggcccctaaggtttcctgctcaagccaggagagtaagcagcctccctgccccctcccacccacttcccttctagctttcacagtcaatcaaaagcctagtaaattctacatcttagacatctaccctctgtcctttcccagagatacagcctgatctaagctgctactgacttacctgtaacaactagtttcactcatcctggttgcctcctttaggcaaagctacagcacagctagcgtgaacatggaaacatacaaatcagatatcattctgttgcctaaaccttagatggtttcccgccaagaccaacacaagcttatatgagcctctgtgagaattttgaaaaaaaggtaattgcccctactatgggataagcagaaaagagccacatttcagacccgatttaccctgtggttaggcttatttatgtggcgatgaaaatgcagcagacgttgcctgtagaataaaatccagactctttaaaatggcttatgaagccctctacaacctggcccctgccaatctctgcagtcacctctcaccattctttgatcttgctcttacagatcagtttcagttccttgaccatatcatgttctcacttatatctttgccaaacctgccactgtttggaatagtcttccctcctttgtgaccacataattcctgctcacttttcaggttttgacaaaaatattacctccctttacaggtcttccccgatgcccttgattaaaaatgctttcttgccatacactcccccagatcacctaaatgtgtccttgcataacagtcattaggattcattgaaattgctggcataggctgagtgcagtgcgcatgcctgtaatgccagcactttgggaggctgaggcaagtaaatcacttgagcccaggagttcaagaccagcctaggcaatgtggtgaaaccccatctctacaaaaaaaaaaaaaaaaaagaaaagaaaagaagtaactgggcatggtgttgcatgcctgtagtctcagctactcaagaggctgaagctggggggttacttgcgcctggaagtgtaggctgcagtgagctgtaatcgtgccactgaattccagcctgggcaacacagtgagaccctgtctcaaaataagagagaaattgctggtataacgtcaacattttctaatgaactctcagctcaaagagagcagagattttgtctgtttgctccccactgtattatctgtatatagtaatgtgtctgatgcttagaagctcaagaaatatttattgactgaataaataattacatgaataaaaaagcctggaatccttgttacagtatagtgggaagaggtctagtccaggctcttccactaacttattggttctgtgactgtaaacaagtttcctaaccacggtgagcctactctttaaatgtaatctttaaaatgttgacaataccgtttgtcctatctaccatcaaaattgtcatgaggctcaatgaagctgaggacaactaatgtgtactgacagcctaccacgtgcaaagctttatgctaggtactgccatctgtattatcttgaaaaatagaagaatctctgaaagactgtcatttacccaaagatcatttttcatagtaagtggcaaactaaagacttaagtaggaatttctgtgattccaaaggctcttttcttctcgtcccttcccttcctttccctgccctgccctgccttcccctcctctccctcccctcccctcctctcctctctttctccttcctcaccatgttccatcaatatctatctgattaatacttcaagtcacaggacaagcatcactcgttttgtgaaaccatctctgattcttctgaccagatttatgtgctcctataactatgttcatattgtacttactataataacattagttttaaatttttttttaccacaaagtttttgtgagaggggagcatgtcttcccactattatattatttccagtatcttgcctggatattaacattttataagtactaaaggaatatttgttaaatgaatgaatgaacttactttctctggcttttttagaaaatttgataatacacctaatttttgttcagtgtttacagttttatatttaatttataaacagcaataattgaggccccaaccacagtagctcatatgcttaaagttgttaagatagtattatgaacatacgacatcagctcttgcccaataatagacgtttggttttagattaatatatttaagattaatcttaaagtgcaactaataggctgagtgtagtggctcacgcctgtaatcgcaccactttgggaggccgaggcgggtggatcatttgaagtcaggagttcgagaccagcctggccaacatggcaaaaccccatctctactaaaaatacaaaaatcagctgggcgtgctggcacgtgcctgtagtcccagctactcaggaggctgaggcacaagaattgcttgaacctgggaggtggaggctgcagtgagctaggattgtgccactgcactccagcctgggcaacagagcgaggctgtgtcaaaagtaataataataataattttaaaagtacaaataattattgcctgaaagggaatatgctaaatatgagatacagggaaatgattcaggttcacttcaaatttaatattccagttttaatttgatataaggcaacctcagggaacaaacatgttgttagtagcaaactacttagcttagagaacttaacatagtatttattgtaatgttcccctgttctagaaaatcataactaataatagaaataaaacccagctgcatatcaatggccaagaacatatcaatggactagaaaatatgctaaggagactaaaacagacctgaacatttccttcaaatttaaataaagtaagtactttttacttattactaagatctgaaagatatattaaaaatactttgaaattacgtaacatgtgatctaaattgttcatctaaaacaacagcttgtcaaaatgctaatcactaggaaccgagaggtttgtttagttaatagtgcttcctttcacatgtgcttatgtgcttttcagaaggaaatctgaaatctattattagctttccatagtcaactcctgattatccgagttaataaaatagaacccagacatctgtgctaatagagagaacacagacatacaatagacctgattcagatccaaaaaagcagataacacaaaaattacatctttgactccggaataaatgttgattctttgtagcatatgtgccttcctaataacactccattagtttttctactatagcacaggggaactatgctacggaaaactcacctacacatgtaagtgagagttcactctagattgtgtgaacgcattgttagatgttagaattctgtcagtggtattcattccgcacactggattctgatcatcactaatatgttgaaaggtctcattctcttcaatgctccaggccctaatacaagattcccaacctcataaatggctcctgtagaaagtaacaacatcagggtgaagaaaaagtcagttatgggaaagaaaaaaaaaagccatgctatgctttgttttgacctcgtgaaagaacagggatcactcaagtttttactgttattttcaaagtcaagccttagatacttgttcactaaaggggaagaaaattataaattattgtacattattagatacatggctttctagagtgaaattaatgattttggaaatgctgggccaattactttataaatgtctaagaaaaatgaatatcttcctcatgtaaataactgcaatcttttcatctgtaaaatcagatcagttatgtaacaaaaacttacattaaaaatgacatatctccctgaggcaacttatgaaataacgaatgaaaggtaggctcatgcttccgaagaaagcaatgtagttcagaaaaaactacagagctcaccttactatatacatagcaataggcacataggtggcagaatcccagcaaagcaaatattctttcagtgattcaataatttgccatttattgagcacctattataaggtcagtcatcatgctggacactgtggatacactttatttgagacatggtccctgcatttaaggagctcacagacatgtaaataattttgtgtaagagatgcaatagtcgaagcatgtgaagaacgctagggggagtatggatgcaagaattggtgggagttaaagaaggcttcacaaaggaggttactggcatagacataatgtttgtaccctcccaaaattcatatgtttaaatactaactcccaaggtgatgggattaggagtggggcacttgggaggtgattaggtcatgaggacagagccctcatgaaggcgattagtgcccttattaaagaagcctggccgggcgcggtggctcacgcctgtaatcccagcactttgggaggccgaggtgggtggatcacaaggtcaggagatggagaccatcctggccaacatggtgaaagcccatctttactaaaatacaaaaaattagccaagtgtggtggtgcgtgcctgtagtcccagctactcgggaggctgaggcagggttgttgcttgaaccccggaggcggagattgcggccactccggcctgggcgacagagtgagactctgtctcaaaaaaaaaagaagaagaagaagaagaagcccaagggagctcctttgccctgtccactgtgtgagaacacagagaaaatgctccgtctatgaaccagaaagtgggctctcaccagaaccaaatctgctggtgcctcggtgtggcctccccagcttctggaactcaggaaagttaatttctgtggtttgtaagttacccagtttacggtattttgttataacagcccgaatgaactaaaagagttgtctttagccacagttcatgtaagaattgtaatttaccaagtagattagatgccaaggcattccaagatgatgaaaaagtacttaaaacaaggagccatgaactctaagaacaacatacttagaagtccatgatatatttggatagaggtgaacaggaagttatatccaaattatcaaggactgtgttgagcatgctaagacatttggatattcttatataaaagttattaagcagggacaaagcataagatgttcttaaacagcggaatggcatgatcagatatcctttttaaaaaaataaaaataaaaaaagaactctgttagctttaagagactgtcaagtcctggaggtgggaagcctaaatgagagacatcaatagtttatttaggtctggatgatccctaatatagtctcccaccctctgtcttatgtcttaagatttcattatcagagctttagctttataatttagtacctattaaagtaaaaattggtattttgggaatgataggatagaaaattgcataagtggttaagttgagcttggggatgtggggcaaaggtgacagttttaaaatccttccctctttattgtgtaatctcaaaaagatcaagggactggtattgatgggagaggcaccttgaggccagagcagatggagagagggacagacactctctttccaaaatcagaggagcatgggatatgtttgttttctgcctctccataatatggcacaacgaacttagtggcttacaagagcatgcatttattatctcacagtttacaagagtcaggagtctgggtggcttaactgggccctctgctcagggtctcatttagatattggccagggctccagctctcatctgagggccagggtccttttctaagctcacagactgttggcccaatttgcttccttgcagctgcagagctcatgtggtttattctccaaagctagcaacaaagagagagaaattcagctgcatcaagttgctaacttctatgcccgaaatttaaggaatcagcttattatcagttcatctctcttttgattaacttaaaaccagtgattggagaccttaattacatctgcacaatccattcacctttgccctaaaacatctgggagttatatcctatcacctttgccattggctagtagcaagttatgggcctcacacacactcaaaagaaggacctcacacaaaggcctggagacagggagcaggatcacagccttcttagaatcctgccaatgacagatttgaagagttgaggtcactagagtctaggagaggcaaggaacaatcagtctatccagtaggtagaagtaactggggagaatgtctggaacaagttctgttacaggctggctcactgtggcatgacacctaaaagtgaagcctgcgtttgaagggcctggccccaggtaaacacatgaggcacccacccaacatagacaagtgcagagagcaagaggggaagatgttctccccaaagaagactgtacagatagaagatctgaatagagaaaaaggacttgtagtttgaaaactgttttcaactagggggaaggaggggattttctccatagcaccaacctgggaataccaaaagactcttttcctccttttgttttaatttttcaattaccgtaagcttttctctcacagctttatttttaactttaatgatcacacatatatcacacaaatataactaatacgcagggagatttttcaagagatataaacatcctggttgagaaagtcaggagagaaaaactactaagtaaactaaaaatgacaagataattagagagaagatatatacagcaataaatttgaatttcaaagaaaatttcaggtaacaaatctgttatattttcacgtgcattaatagaagttaaagcaagagaaaattgagttaataaaaaattgatttaaaaaaaaacagattttcaacacaaaatctctctgaaactactgcgcccttgcctctgctgtaattttggaaggattagcgcttgtaggactctggctgtccccagcagtgacacaccttcccaccccaggatacataaaactggggcacagagcagatggaattttcagctctgctcatcagcaggttgacctgcttgttccaagcaattttgtgaatttaagactctggtgcctggctggactcatagcacccgggtgctctgcaatttgtacagaattctaaaatttcaggctctgcttgttgcctagatctttagtaataacagcaataaaaaagtaataatacccacatgtattaagcatttatgaagctacattaattaagcatatgttgtgtttatgtagtttgcagttaatggcactggcttaatgtaatagggatagtattttttaaagaagaacttgatatatttccatcttcaaattgtgtttcactggaaactgctcctcttccagggctggacagggtacctaatgccctcacggaagaaaaggtgggttagcaagtcaatagacttaaaaatcagagtcctgctttagaccaatcagaatgacgtatgaagatctattgtatagacaaatgagaagcccatcccagaagagaaaggacataccagcttctggagaatttcaaaacggaaaaggctgaatgagatggggaggatagggaaatagttctacatttgtgtctggaactttcctttctgggcactggcctcgagagaatgtagcataataaataggtattgggcaaacataagaaaagagagctctgggttcccaatcccatctagattctgggcagggccacatcccattaaacttgatagttccctgtggtaaggactagcaagattttggggataaatctttctgagtcccactgatattcctaaattacgaatgagacccagaggtacctggagcctccagaagggggcctcagcaggcagctggtctgaaagccaactggactgccctggggccagcttggcaaggggagaggtgaccgctgcagaggctaggaaagacagatggccgacctggcagagactcagagggaccactttgccagtgcgaggcgagctgaggtgaccagccagaaagagctccaggctctggccagaatggtcttgacctaaatatgccacctgcaggccacaggtatactggaagggatgcccactccctattatcccttttcctgtgtgtctctccggccccatgtaccagccattcattcgttaggagtttgaacaaaaagctaattcaaactttctccatcctcctcaaatatctcatctttgccctcttttgttactctccaaagacagccttgctcttggttcacagagaaaataagagccaccggacagtaaaatgcaaatcagatcatctctcttcgtttaaaacacctatcaatgacttctcattgctcttaggataaataccaaaatcctgaaggtagctacaagggtttgattgggcttttactcgctttgcagcttcaactgctgtcatttctctcctttctctctgacctgcagtttcatgttaatttctaccacagggatttttttaaatatgctattccttctttaaagaataatcttccttccccaccttggcctacttaattcttctttgtctttcagagccccactcattgttggcatgagatcagtcacccccttgagatactctcacagcactttctcatggcacaccctgagtaaacatatttatttaatattgcttaggtaagccaatagtattatatcaactaatttcatttggagtagcaagtcccatgcactagctaactaacatcaccccattatctaactatatattttcataattttaagtgctgaaaagcaatcaacttttcttcatcaagcatctcgtaacctgtaccttgccttctacctgatgtgcaatttgtcacaaaggcactgggtgaaagtcatcatgtgacaccacaggaaaacaggaaaaagtacaggagacacatttcatgatttatcaagaagtgacaagaatataatttaccattacatctatatgcagcatttgatataaaaatacttgcctctagggtacctaaaatcctggtctattgaaagtactgaacttaccaaccaataactcagctaatatatttaatgtatatatttttaggaaaacaggtcccaaagatgtaatctcgcatcatcctctctaaccctttactttctccatatcagcttgccccgaatcttagcttggagttgagaggtcatctcagcagcctgttcctggccttcctgtcggctggaggccaaagcctccctcagctgcctgtgtccagtggctgctgtaataatgatgtctcagcttcaggaggtctatttccaggccatgtgagctaattaaaacacaggccttcatttgcctttctggcaatccctgatcagtgtgagaggcctatgccaccctctccattctaattttagttctcctctagtgttttctctcctttgcagaaaagcgtcctatgctgctaagcacttacaggcttttgtttttgttatttctcccacttggaaagaagcacttttccactttactccttttgggttttctcctcccatcagttttctcctgcaggaggtgatggtttgaaactactagcaaaactgaagataattagttacccaaggtagttgacttgcttagcaggtgcccttgagaaagtgctaatgcacaaaattcttcatgtggaaacaactttttggacacagctttctataaagatagagaacacctgttatcactggcgatgctcagcttcttttcccccagcaattcacaacacaactatccagagttcagaactcataaattcactcacaataggctgagatgctatttttcggtcttttaaaacggatactctttacttctgataagcataaaattatcacatggcttcctcccaccctaccctccctcactgaaaaaaaatcattatctcaactatctactctacatatctacttgaatatccaacagattttcaaattaaaatgttcaaaactgagatttccccatctccactaatatcagctccatctttccaaaggtcaaaacaccaaatatctttgaattacaactttggtcccttttattttcttatatcctacctccaattcatccaaatatatatgtagatagattgatagatcaatcgatagacagatgatagatagatagatagatagatagatagatagacagatagatctacctttaacatagatccagaattctaccactcctcaccacctctatttaaaaaaaactgttacccgaggaaagaagaacacactggcaaccattaaggggacccaagagattgaaatatcttagcagatgggttctcaggtcattcaaaggtttcacatgagaatgagacacatagtggccatgtgcagagagagccccttagggaagtggccttgaatgaaacacctctcttagggagactttggcagccagggaatgacatgaggagccttggcacctcaaggaagagtgggacaaagtatagaagaagtgaactcagataaaggtgatctatattacaatgtgttaaacaaatggaaagattaaatattatgaacgcagtgaatgttatgtctttagaagtatcaaacatttcttccaggaaattgttgtactgatttaattgcagtatttaagaatatgttgatggaggagaggctaactcagctgctcagtcccatggtcttaagacaattgctgataattataatcattcctagttccttgtgcatcccattctttgaatccaacaattattccaaccctcttctttaataccttgactccagcaatactttgaccccactggaatctccagtcctaagatcttattgatttttcagtgttaattatctccttgttctctttcacttccctcttcatcttgaagtctatggttaaatattacactcccttgcatttatatttccttgctcttcaatcacttcaatataccaatttagcaaaaccacaacctatgtaaaattcaactctccaaatactctgcacctgcatcctccagctgacataggctggagaaaaacacagaaccacattggatagtctaattctaaatgcatgaacacagactttaaataggcctttaatgctgccaggtgatcacatcatatacctcctttgtccactcactgtttcttctaaacaactatttcacactgttctctctttcctcaaactctacatttccttctctgtctttggtttcaattgaagctgctgctctctactttgtagaaaaactgaaaactatcagaacagatcttccccagattcccaccacatggatctcctgccagtatttgcacccacaaccaaaacatctgttcatgctcctgtccaaaaccagtctctccacttggttaataatagaattcatcatcccctctttctcctccatcgtaacttaaaaattcccctgtgaagaaattccttcaagggtagtctatcattactctaagtcctctcctccctttctcccttaaaaccaccacatgaggctctatcatttccaaccaaattgctcttgtcaaggtcagcagtgacccccccacccccaatattgttaaatccatgaacctattctaacttagtcctcatcctacttaacttatcagctatatttgacagagttgatccctctttccttcttaataactttcttcacctgacttcagaacaagacactcaccaaaagatttccttctatctcacaggttgctccttatcagcttcccttgctggtgctgcctttcattccatccttcctcaagctcagttattggtcttcttcctctacacacgctgcatatcatctgtataatgacgacgttcacatctatacctgcagactggaccttctgctgcctacttgacacatctattcagatattcagtaggcatctcaaaattaactcctggtatttctcactgtttaccaaaccttctcttccccaaatctcttgtgtgtcaaacgataggaaattcattcttacagttgttaaggagaaaggtcttggagtcatccttaattcttctcattttctcatataccatgtccactccaccatgaaattccattggatctgccttaaaaatatgtccaacatctctccatttctctctaactctgctgattcacctgtgatcttagctgctttccctctcttactgcaatgctacaattgccttctaactggctttcctgcatccacccttgttccctctccccatccatgatcgacattatagccagattaatcctcataaaatagaagttagatcatgtgacttttcttctgaaagaactgaataggctctaagaaaaatcactctgggttaaagccaaagtcctgaaatggcttattagggccttacataatctatccctcaccctctcttcttacctacaaatattctacatttcaaggaagagcatccacctttcactcatcagcttaagctagaaactttagagccctccttgaaatatttcccctcatctttgcacatccaattaccatgacctgttaattactctttccttgtatctcttaaaccaatttacattttccctttgctatgaaactatttctccccttctccaatgtcatttcatctcaaatctactacatattaatactagagtgaactttctagttaaatgtgaacctatttatatcattccccagactgtataacaccaaagctttttaattctaacaaccttttttgatgattcacaagttgaagctttaatcacaattcaagctactttttaaatggccctctgttataataaattcattggttcacttaaaagtgttttgcagcatacgatttatttttgaagatgtattagtctttgttctgttaaatgccattttggtcaagattaattttttgtgtatgcaatcatttataaaatgaaatgtagattaatcagtaaatttaaattatacttctaagtcaagaaaaggtcagctatctcggcataagcttggtcagctaccttggcataccttgtacagacttacaacaggcccccctatcttaaagctactacagatttcaaataatagtattaaaaacaaaaataatattaagcaataactgtgataatattaaagaataatattagttgccaaggtttacaaaatgtattaacataaactcatttattactacaaatacctaaagagtagatattatttccactttcagaggagcaaattaaatgtcagaaaagttaaaggttttgatggaaaatatctagcaaatcagtgatggaactgactcttcaactcattctctttatatacccagtggcaatgtctgtaaagcataacaaattaaatatgtgtaagctaataaaatgctacttttgcaagtacaaatgccttccttacaagttttcctttttaatgtaaagcaaagcaaattgtgctttcacattattactaaatatcagtctatcctaaaattgtttatgtaatgtggaggtgatatattatcttagaaaaccactgtaacatggtattggaaaccatttcaactgttaaaaggttagatttcagttctgtttaaaggtcagacctgaaaatatcctgatgattacaatttctccacacattttggatgatgccactgaactcctggcagcagcaaaatgtgtttgttctgatcctctgcttctggtggtcagtttcagagtggagaaaaggcgccagggctttgggactagacctaaatttctattgcttttaattaaaataataaaggggaaaaggtaatattcctatccaactgagacagaaaaatttgttgaaaaccgattcttacctgttgaaaaatattcagaaaatcgatcatccccaaaacaatgtactaactaaaacaaaaccaagaaaggcattctgaaaggcaagtatcaaagcatctgtcattgccccattttaggttttcaaatctggaactagtcattcaaataaatattgtttgaataataattatatgcccagaacccttcccaggtccacataccactattttttgtttttacaaatcacatctcatctctcctgtcctataaaactgcatttagtacatagcagacaatacattttaatgctcactgaatgaatgctaggattgatgtagaatacaaagaattatgttaatatcattgttattgctactactactaatagttactaacatttattgagcactaactatctgccaggcactgtgttagtcactttacatgcatcaccacagtacagggtaagttaatctaattaattcattgttaatctaattctatagtaagaaaactatagcataaagagatcaagtctcatagctaggtaagaggctcagtttcacagttagtaatcaaactttggcagtctgacctcagtgcttacaatgggccagagaccaacctattgcagcttacattctagaaagacgacaagaaataagtaaagaagtaaccaatataattttacataggagataaggctatggataaaagaaaacgggatgatttgatagaagtgactagagtgatatagaaaaatggttaaaaacatgaactctagtaccaggtttgagttcataccagaactttttccagctttgtcattatgggctgttatttagttacttatgttctttgtgtatttccttatctacagataataccgaatttatataacagtcatgaggtttaaatgaattgatatacataaaatgcctaaaacagttcctgacacatagtgtcatttaagtatttattattattgttatttttgcatttttattgttataattcttatcacgttgaggacatctacttgagatagggtggtatgggaaggcctctatgaggaaatgcatttgaaccaaaacctaaatgacacttaggcacatgaaaattttaaggcagagattccaggcagaaggaaacaaagtgcaaaagccccagggctagaatgttcagcaaagaaagccagtatggccaggatgagttcagtcaagttacagagctagtcaggaaccaggctaaattaggcatcactggatatggtaaggagttgggttttattctaagtgcgattagaagacatgggaacattttaagcatggtaatgacatgctttgatttacattttataaatatcactccggcttccatgaaagtttggattataacttccatagaatgtcaatcttatcattcccattagtcattgtttttaaaatcttagctttattcctagggaaaagtaattctctgactatatttccagaatgtttgtgttagtgcttttaaacatagagtccgattaaaggacttaagtaggtatatgaacatacatatatacacatacactcactgtgaacaaagattatatggaatactcacatagaccacacttcattattctaaattcaaatcagaatttgaattcactgaatgaatgctaggctgggtttttgaatcatgtttcttggaaggaaagtaattgtttacttacatgaaagttgaccatatgaattaggtcattcttgttatacccaactaaaacagttgagaggtcaaggggagaaaacatctagggcacataacactgttccaacaatgtaattccctgtgagcttggctgctgaagctgcctgctgtaacctgaaaccagttttatctaatagctactgaaacaacctgctgcaactctgagaatcattttacccatagccatcacttaccaatcaaaactttccagctcaccaacatattattagtgccaatgaacttcctcaaagagcaatatgtaactttccccttttttgtaaaacctctatccgtctgttctctggacataatgaagaccatccagcctatgagtatgccacaaatgcaattcttgatttccaaataaaacatttaaaattaagacttttgtctctatattgtatttgtctttaacccttattgtaaattatatggcaggggaggatattctttgggtcccacttctcttatttctaatatgtcccttggccttgccaggcgttagctccttgtcccccaaataaagaaagctttgcaaatctgactgcatggaacaatgtatgttttactagtgggtggtgttatttttcttaatcttaccctcacacccagcattttctcccccaacacacttcctctgcaagttcaccatggtttaaataggttgaaagccagcctaggccacattgtacaattccttcttaccagacatccttgatataagttctccggcttcaaagcatctcttaataaagttgtctgttgattagttgataccgctgtgtggtgaggggtaaatggcagtggaagaacatttccaggtccctggtatttttactactataatcacattaaatcatcatctttaatatctaacaccaaaaggccatccatgtattcaaaaagaatattacagccacactgacaagaatcttaaagccctacattgccacacatggaggtgaactaaaaacacaatgcaatttgtacgaagactcctcctaattcctctaactcataaatacttcagtcttaaaataaaaatacagctgcataaagtgaactgctttacctgtatggttagttccctcattcttgacttctgtggttcccacagaagaggtgggtggactagcaggaggactggcagtaaagcttgtgcaccctgtagatgtgttgatttcaaaatattcttggttgtgattcattcggtgaaaatccagagaagacacaatggatgttcgctgtttaggctaaaataaatgagcatgacgagagtattaatatgatcatgttcatcttcagcccaatctccccatcaatttaatctaagtgataatttttttcagttaaaaactatctgggttttatacttaaaatataattgtgctttacagagatacattaatttcttgatgaattaaataataaaaaattatttaatgagaaaatattatggcatagttgatgtgataggttaggcttttcatttgctttccccagaagattgtaaaaatatagtgcacaaaatttctcttggtaatcaattttgaaagttgcaattttaagtcacctttcattcaactaacatttattaagcatctggcatttgccagacccagaggatatagaatctaataataaaagggccttacaacatagaagaataattaaggcagttccatttttttattctttaaatagtccaaggaattggtggcattagatattgttcccaagtacaagatgctggaattttatcatcagaattaaataaagttatatggaacattttctaagatctaagaatatgcttggtatttttagtgaactttgattttcttttttaagaattttaattaatccccaaatagcaagaaaagtcaatttaaacataaaagttaaaatcatggagtaatagcagatataatctataccctttgtcagtaatgaattactccccgtagcaattttctggggctttttccccatagttttaattatattcactttcttttcttgcctagcagagcttctaacattgtccttcagaaaaactgcagttttttggctctcaaatgtgtgtgtttttcccaggattcaactctacctttcttactttttattttttagtttatattactgaaatactaaaaatctcttataataattataagagatcaaatgtaaactttttataataaggtaaagtttattgtactttactttctccaaagtacaattaacttttggtttactaatgtttttattacccttaaatatgtgttaatccctgtactccatagattattttcctgcaaaatattcaaattgctgtctcttccagcttatcattttcttccaagtagatatcatttaatctataatctaaaatagacaatcatatggaaaatatctgcacagtatagggtttttaaaaaaatatataaggtgtgtaaattatcacaatatgatttattctttcaccaatatttcaccaaatatttttatgaaagacattgagaggtataaatattgttatgcaagagagtgcaagtcatttattattatgacacatcaactcagtaatagaattcaaattagcacccacagaggactcagttgcttttgaaatacaaaagatcagggtttaatgtcaggcttggtttctcatgaaatgtctgtccttgggactgctgaatctcaatttcacattcaatgtcctttccaccacattctataatagcaattagaaaggcatgagctatagcgctggctccaatggagcccatcattctaggctttgttttattgtgttgtgtttttgtttcactttatgtgtaggcaatggaccacatttctatgtttcttctcataaattttataaaggtcaagccaaatgatatatatgattcccccatttctaattgtttcttaaatacatgtttctgaatcctgaccacccatggttctaactgctttaaaaacacaatgttttatgcaatcatgaaaacaaacaagctattttgtgcaatattaattcattctacaaatatttgctgaacatacactaaactgcagatatcatgcacgtaagcactgtgataggaataaaacaagacactgtccctgttttctgtatgaatataaacgaggtgggaggatggatggcacatgagtcttcgaaaaagagacaagcaatccaatgattatgcttcagtatcacatagcagtaagggtgatgaaaaattagaagcattatacttagtcatgccctaaggcaagggtcagcaaactatggcctgtggctcaaatctggctttcttcctgtttctaaaaatgaagttttattggaacaaaactgcacccattgctccctcatttagttatggtctatgactgccctcgtactataattgcagagttcagtagtcgcaacacaggtcatattttccacaacacttgaaatatttattatgtctggctttttagagaaaatatttggccactcctgttctatggaattgtttcacacctcaattttgtgctcaataaaaccgtaactataggtttccttttatttcctagcctgacttgcctttgggttgggcaatgtgactaattctcatcaaatacaatattagtagaagtgacatttttctatccctctcttactctcctaatgatgtagttgaaagatgaaggaaagtcatgaaactcactaattagttttatgagatgttaaagtgaaccttccttttttatatttttattttaagttcaggggtacatgtgcaggtttgttacataggtaaaggtgtgtcatgggggtttgtttaacagattattttatcgcccaggtattaagcctagtactcattagttatttttcctgatcctctccctcctcccaccctccaccatctgataggccccagtgtgtgttgttcccctctatgtgtccatgtgttctcatcatttagttcccagtgatgagtgagaacatgtggtatttgattttctgctcctgcattagttcactcaggataacagcctccagctccatccatgtccctgcaaaggacatgatctcattcttttttatggctgcatagtattccgtggtgtatatataccacattttctttatccagtctatcattggtgagcattgaggttgattccatgtctttcatattgtgaatagtgctgcaatgaacatacgcatgacgtgtctttgtaatagaatgatttatgttcttttgggtatatacgcagtaatgggattactggatcgaatggtatttctgactttaagtctttgaggaatcactgcattctcttccacaatggttgaactaatgtatactcccacctgtagtgtataagtgtggctttttctccacaaccttcccagcatgtgttattttttgactttttaataatagccattctgaattgatttgaaatggtatctcattgtggttttggtttgaattactctaatgatcaatgatgtagcactttttttcatataattgttagctgcatgtatgtcttcttttgagcagcagtgtctgttcacttttctttcttttttttttttttttttttttttttgagacggagtctctatcacccaggctggagtgcagtggcatgatcccagctcaatgcaacctctgcctcctgggttcaagtgattcttgtgcctcagggcctcgagtagctgggattacaggcaagcattaccatgtctggctaatttctgtctttttagtagagacggggttttgccgtgttggtcaggctggtcttgaactcctggcctcaagtgatctgcccacctcatcctcccaaagtgctgggattacaggcgtgaacgaccatacccagcccccaatgcccactttttaatgggggttgatttttttttcttgtaaatgtaagttaatttcttatagatgctggatattagcctttgtcaggtgaatagtttgcaaaaattttctccccttctgtgggttgtctgtttactctgttgacagtttcttttgctgtacagaggctctttagttttactagatttcatttgtcaattttttcttttattccaactgaaggaacacttatacactgttgatgggagtttaaattagttcaaccatgaagacactatggtgattcatcaaacagaaattttgaggatatttctgttcctaaaaacaaaaatataccatttgacccagcaatctaattactgggtatatacccaaaggaatataaatcattctgtcataaagacacatacacacatatgttcactgcagcactattcacaacggcaaagacatggaatcaatctaaatgcccatcagtgatagactggataaagaaaatgtgggatataatatatagcatggaatactatgcagccataaaaaagaattagatcatgtccttttcaggaacatggttggagaccgaggctattatccttagcaaactaacacaagaacagaaaaccaaatattgcatgttctcacttatatgtgggagctaaattataactaatggacacatagagaagaacaacacatactgggcctattggagagtggagggtaggaggaaggagagcatcaggaaaaataactaatgggtactaggcttaatgcctgggtgacaaaataatctgtacaacaaaccccatgatactattttacctatgtaacctgcacatgtactcctgaactcaaaatagaagttacataaaaaatttaaaaaaagaaatgagaacaaagaagctgctttgaggaaactcaacaaaattcaagataacgcagatgaggtattcagaatcctatcagataaatttaacaaagagattgaaattattgaaaagaatcaagcagaaattctggagctgaaaaatgcaactggtatactgaagaatgcattagaatctgttaaaagcagaattgatcaggcagaagaaagaattagtgagcttcaaaacaggctatttgtaaatatatagtcagagaagacaaaagaaaaaagaataaaaaagaatgaatcatggcttcaagatctagaaaatagcttccaaagggcaaatctaacagttattggccttatagaggagggagagaggtgggtggaataaaaagtttactcaaagtgagaacagagaacttcctagacctaaagaaagatctcaatattcaagtataagaaggccatagaataccaaggagatttaatccaaacaagactacctcaagctatttaataacttaactctcaaaattcaaggataaacaaaggattataaatgcagcaagagaaaagaagcaaataacgtacaatgaagctccaatatgcttggcagcagatttctcagtagaaactttacatgccaggaaagagtggcatgacatatttaaagtgctggaggaaaaaatgtttatcctagaatagtatatccagtgaaaatatccttcaaacatgaaggagaaataaagactttcccagacaaacaaaagttgagaaatttcttcaacattagatctttcctacaataaatgctaaagggagttcttcagtgtgaaagaaaatgacgttaatgagcaacaagaaatcatctgaaggtacataactcatgagtaaaaaaaacacagaatagtataacactgtaattgggatgtgtgaactcatattttgaggtgacaaatgaaaaaatagactgataataacaagtatgaaaacttttcaagacatagacagtacaataagacataaatagaaacaacaaaagttaaaaagtagggggacaaagttaatggctacaatatttattagtttttcctttgcttgtttgtttatgtaatcagtgttaagttgccatcagtttaaaataatggattataaaaaattatttgcaagccttaaggtaaattcaaattaaaaatcctacaatagatacataagaaataaaacaagaaattaaaacataccagcagagaaaatcttcactaaaaggaagagagggaggaaggagagaaggaggagatcacacaaaaaactagaaaacaaataacacaatggcaggataagtgcttatcattaatatcaataatattgaataattagactagaatctccagtcaaaagacagagagtagctgaatgggttaaaaaaaaaagacccaacaatctattgcctgcaagaaatacacttcacctataaagatacacatagactgaaaataaggggatggacaaagatattccatgcaaataaaaatcaaaaaagagcagtcgtagctatactgatatgacaaaatagatttcaagaaaaaactataaaaacagacaaaaaatcattacataatgataaagggtgaaaatcaagaagatgatatcataatttcaaatatatacgcacccagatatataaagcaaatattattaagggtaaagagagacataaaccccaatacaatagtagctgaagacttcaacaacccactttcatcattggacagatcattcagacagaaaatcaacaaagaaatgtcagacttaatctgtactataggtcaaatgggcttaataggtatctacagaacatttcaatgaacagttacagaatatacattcttctccttagtacatgaataattctcaaagatagaccatttgttaggtcacgaaacaagtcttaaaaaaactaaaaaataaattgaaattatatcaagtatcttctttatccactataaaataaaactaggaatcaataacaagaggaattttggaaactatacaaacacgtgaaaattaaacaatatgctactgaatgaccaaatgggtcaatgaagaaattaagaggggaatttaaaaatgtcttgaagcaaatggtaatgaaaagacaacatagcaaaacctatgggctacagcaaaagcagaactaacaggaaaatttatagctataagcacctacatcaaaaaagtagaaaaacttcaaataacctaacaatgcatcctaagaacaagaaaggcaagagaaaaccatacccaaagttagaagaaaagaaataataaagatcagagcagaaatagataaaattgaaacaaagaaaataccataaatgctaaataaaataaaaagttggttttttgaaaagataaaattgacaaacctttagccagattaagaaaagagagataagcctcaagtaaataaaatgagagaagaaaaagacaacgttacaactgatgccacagaaattcaaaggatcattagaggctcctaggagcaagcagtagtctcccagcaaagaaaagcccaggatctgatggcttcactgctgaattctaccaaacatttaaagaataactaatacatgccttactcaaactatgccaagaaatggaggaggaggaaatacttctgaactcattctacaaggctggtattaccctgataccaaaaccggacaaagacacatcaaaaacagaaaactacgggccaatattcctgatgcatgttgatgcaaaaattctcaacaaaatactagcaaaccaaattcaacaccacattaaaaaggccattcattatgatgaaggggaatttatcccagggatgcaaggatggttcaacttatgtaaatcaatcagataatacaacataccagcaaaattaaggacaaaaaactacataactgatttaattgatgctgaaaaagaatttgataaaattcaacatcccttcatgataaaaacccactgggtatagaagaaacagacctcgaatagtaaaagccatgtacaacagacccacagtatcatacaaaatgggagaaaactgaaagcctttcctctaagacctggaacttgacaaggacgcccactttcagcactcttattcaccgtcatactggaagtcctggctagtaatcagacaagagaaagaaataaagggcatccaagttgaaaaggaagaatttgaattagcctttcaaaatcttacatattttgaaaaacctaaagattctaccaaaaaactattagaactgataaattcagtaaagttgcagaatacaaaatcaacatacaaaaaccagtagcatttctatatgccaacagtgaataatcagaaaaaatagaacaaagaagtctcatttacaatagctacaaataaaataaaatatctaggaataaacttaaccaaagaagtaaaagagctctacagtgaaaactataaacacggatgaaagacattgaaaatcatataagaaaatgaaaagatattccactttctggattggtagaataaacactgttaaaatatccatactacctaaagcaatctacagattcaatgcaatcattaacaaaatactaatgatattcttcacagaaatggaaaaaacaatcctaaaatgtatatggaaccaaaaaagacccagaagagaataagccatcatgagcaaaaagaataaaactggaggaatcacattgcctgacttcaagttatactaccaagctatagtaaccaaaacagcatggttctggcatagaagcagacaaatagaccaatggaacagaatggacaacccaggaacaaatctatacactgacagtgaattcatttttgacaaaggtgtcaagaacatacacaaggttacataagggaaaagacagggtggtggtggaaaaacaggatatccataagcagaagaacgaaagtagacccctatctcttgccttatacaaaaatcaaatcaaaatggattaaataattaaatctaagacctcaaactacaaaactactaaaagaaagcatcagggaagctctccaggacattggactaggcaaaaatttcttaaggaacacttcacaagcataggcaaccaaagcaaaagcggacaagtgagattatatcaagctaaaaacttctgcacagcaaaggaaacaaccaataaagtgaagagaccacctaaagaatgggagaaaatatttacaagctatccatctgacaagagattaatagccagaatatgtaaggagatcaaaaaactgaaaaggaaaaaaaatctaagaatctgatttaaaatgggcaaaagatcagaatagacatttctcaaaagaagacatacaaatggcgaaccgatatgagaaaaggtgttcaatattactgatcatatgagaaatgcaaattacaactacaaggaaatatcacctcaccccagttaaaatggcttttatccaaaagacaggcaacgacaaatgctggcaaggatgtagagaaaatgaaacccttgtaaactgctggtgggaatgtaaattactacaaccaatgtagagaaaaatggagattttggaggttccttaaataactagaaatagaactaccatatgatcctgcagtcacactgctaggtatattcccaaaagtatatcgaaaacatagctcattctctctcatgtttattgcaggactattcacaatagccaagatttagaagccacctaagtgtctatcaacatatgaatggataaagaaaatgtggtacataaacacaatggcatactattcggctataaaaaagaatgagatcctgtcatttgcaacaacatggatggaactggaagtcattacgttaagtgaaataagccaggcacagaaagacaaacattgcatgttctcatttatttgtaggaactagaaaaattaaaacaattgaactcacagtggtagagagtggagtgatggttaccagatgctaaaaatggtaatttgggtggtggggggagtgggaatagttaatgggctcaaaaatgtggttggaatgaataagatctagtatttgatagcacaatattatgactagagtcagcaataatttattgtaccttttaaaataactaaaaccgtataactgaattatgggtaatacaaagaaaggaaaaatgcttgagttgatgaacaccccatttaccccaaaatgattattacactgcatgcctgtgtcaaaatatctcatatactctacaaatatatatacctactatgtaccccaaaaaactaaaaattaaaataaaaaagagatatctatgtggagaaatggaataacagcaatgggagaaaagaataaagagatggtcataatattaaaatggagataaaaaagaataggtctagaatattcatttaaacatgtttgatttaatataatttttactactcaaatagaattgcactcagccattcagtataaaaaagaaaaagtgttttcacaaattcactgaaattacatattgaatttgccaagctttgatatgtagaatgaattgcacttgtgttcgttgtggcttctccactttaaaacatatccctccactgtggtccagtcctcatatcaccctactttccagaggacttgcttctatacatatttacttagcaggagtcagcaaactacatcttatgtgccaaagccaggcttctgaatatttttgttcagcctgaaagctaagaatggttttcacattttttatcgttttttagaaaaggaaaaataatattagtaacacatgaaaattgtatgaaactcaaacttcactgtttgaaaacaaagttttatggagacatagccatgtccattcattgatgtattgtctatggctgttttcctgctacagtagcagagtgtagtagttgtaacgtagaccttatgaacgaagacttaactattttactctctgatcttttataaaaaaaaaaaattgtgaccctttctataaagtgaataggaaatttcagctgggcacagtggttcacgcctgtaatcccagcactttgggaggccgaggtgggcggatcacgaggtcaggagatcgagaccatcccggctaacacggtgaaaccccgtctctactaaaaatacaaaaaattagccgggtgtggttgcaggctcctgtagtcccagctactcgggaggctgaggcaggagaatggcgtgaacctgggagggggagcttgcagggagccgagatcgggccactgcactccagcctgggcaacagggcaagactccatctcaaacaaacaaacaaaccaacaaacaaaagttaacaggaaatttctctgaggaggtaaagttgaacagacacaggaacgactgtgattgaatcagggaaccagtgcaacataaaaaggtaggaccccttgtttcaagagcaggtacaaaaacttttttctttttcccatgttctctctctagatctgttatggtgttcttttatttgctacttaacgtattgctcccttggtcatggaaacactcacagggtgagggcagattcttacaggaatgcagtggctctgccctgcaactcagtaagtgcatctgaccttgacccttccccacactcatggtctcactactgcatcagcagtttctgggcaggccaggggcacctgggttggaggagcaggtggaaaagaattttactcagtaaagaaagtagaaatagggtggaaagtgggaaaacagttaagtcaagattccaagccccaacacatgttcaattttcccataaaccgccttacaaaaccctgggccaggagcaccagggttgggggagctgctagagtccccagtgtctactgttcccatctttatgtctgtgtgtacccaatgtttaggtcccacttattagtaagaatgtgtggtatttggttttctgtttctgtgttaattcactcaggataacggtctctagctacattcatgctgctgccaaggacatgatttcattcttctttatggctgcatagtattccacagtgtatatgtaccacattttctttatccaatccactactgatgggcacttaggctgattccatgtcttctctatagtgaatagcaccgcaataaacatatgagtgcaggtgttttttggtagaaatatttattttcctttgggtctatatcaacctgggatattttgtgtgatacatatgacgaaaatatttaattctaaatatttttttctcaaaatgatagcctactgtcccaataccattatttatccactgatttgaaatgtcacctttatcatatactaaatttccaaatagagattgggcttgcatttttggactcgactatattcccattgatctatttgtctattcctgtactaacatcacactctcttacttactgtatggcttctatttctagagctcctagtgcgtggatattggatctctttgacccttcctgttttatatactgggagtattctacagttcattgtcctaaagaaccttcattaatttgctaggaaatacttattgaccattatcagctgtgtggtcaggcgctgttgtagcctctggggatacatcaatgaacaaataagataaggcacataattttaggcattttgttttaacttttggtgtgattatgctatttttaattttaaaaacttttcttttttttcaagtattccatttttaaaatagcctgttattaactttataagttcaatcacctctcaaatctttctgaggatactgattagagtctttttctggcattaagtcagttttcttaaaggttccttactttgttcattaagcctggtttctctctttttggttgttaatttttcctcaaccatctggtgtcttggtcaagcactttttatacctagggcactgtccccacattaggagcttcagggggtccttcaccttccttagatacttattaccatctggtgggcaaacaacaaagctgattgctccacataggagatgctaaggttctggttgccctgtccactccctggctttgataaccatgccctgttgctcaggcttgagattcttcgcagaggtctaatgaggatgtcaaatccactcattgttccagtgacatcttcccctcttccaccagtgttggatggtgggctttttcctcttgttttgtctaaatctagcaatatttgattttatcttttagaatttcgcaaatgcctcaggtagtaactctccctgtttttcatcactgctatgaatttattgttaattttgtatttatttttaccattttgattgcaagtaaggaggaggaaaatgtaaacacttgcgatccactcagctttatcagttagaattctcatatttctctgtcttgatcactttgaagactgtatataagagatttgaggaagtctggacaactcgaagaaagtaagtatcattgccatttcatcacagatgtcatgcaaatggaaaattattatattttcttgatttttcaataaatggaaaacaattttaagtgaagtacaattttttggttgttatgaatatgatgttaatgtgatcaagacttgctctaaagatgtagaactccttatcttcaggtaggcaaatgcaattcttctgctttatagattatggccaaacatagacaaaaaatatatgatcaccacaagggagttaaagaagtcgtgagtgagtattgagtatttaagagacgtggacattcttctaggcacttgaaatttgttgtctcattgaagcctataatgttagtatcaaaagtagctattactctttccattttatagacttgagattcacagataatctcagttaagtgggagagctgaaattaaagttaagtgggagagatgaaattaaaattaagcgggagagatgaaattaaaacacaaatctagtgaatttcaaattgattgcattttccccgaaagacaccacactataggtaaagcaaagagaagcaaacatatttacaagtaaagccaagagcctaataactcttgagtttctcatctttatatcaacgcacaattttcctactcttcagtctattggtagcattgatttttttaaaaatctacattgtttcaaaagctgttgaaataaaacgcaagtgggtggaaaatgggaataaatagtatctaattctgctatgcattaaactcttacagtcactacattttttataagagaaaggcagaaaatttttaaaaatctttatatctcctgactttagctcttcatttcatttttatatagaggtatctgactatgaaataatatgcatactcatcttctatttaaaaagacaaattataaaacagactgtagggactctgtactgcttctcagacactgcaatcccacataggagcaaggtcagatttactgatacaggcaactgtccaaagcagctcttctcctgctagctgttgatgttctcttcctctctgccagctccataacaagggccctcacccggtgcaccaccctcgcccacacacacaccctgaccgaggccctgagagttccaggttcctgcacctgcctttcctgcccagggctttttgagaacagacagttgctctcaagcccagggctttctgagagcagacagttgctcttgagcccttctctgaggtcctctgaacacccctactccaccatcaatcagagcagttatactttttttttttgcttttacctattaggtttctgttaggttgaaacatatgaaactgctgatattcaaccgtattacctgcaaaaatagcaatttcatataactcagcctacataaacttttcttttaacagagttctctggctaaataatttgaaaaccatttctctaggccttaagtgagcctgacattttgctggccccagtaaaattgaactctttcccttcttagacatcactagtaagagtataaagacacatgcacatgtatgtttattgcagcactattcacaatagcaaagacttggaaccaacccaaatgtccatcaataatagactggataaagaaaatgtggcacagatacaccatggaatactatgcagccataaaaaggatgagttcatgtcctttgcagggacatggatgaagctggaaaccatcattctcagcaaactaacacaggaacagaaaaccaaacaccacatgttctcactcataaatgggagttgaacaattagaacacgtggacacagggagggaaacatcacacactggggcctgtccagggggtgaggggttaggggaaggatagcattaggagaaatacctaacgtaaatgatgtgttgatgggtgcaacaaaccaccatagcacatgtatacctatgtaacaaacctgcgcgttctgcacatgtattccagagagtataaatgggtatatgcccttttcagggcaacttgtcaaaatagattttttaaaagtgttaagtctatccctagtatttaacatacataagcatgagtgtggagtttgttagatggaaaatttgtaatatatgtttcttcgtatgagttagtttcttcatacaatgtattcaaatcttcattggaaagactgtatacacacatgagaggataataaaagttctagtttttattctagttttatttaataaaggtcaaaagtagttttggactcaatgtagatattaaagacctgaaaagcattttgacctccaaaccatggagtttgtcctcatagaagctttcccagcatgaaaatagtcacaactattttgcaaaaaatactttttgacttaggtattgcaaatacttatatattaatattttatagatgttcatgtcaacttcaaatgcatccagaatttaaaataagtaaaaccagctttattttccacacttaagttctttttttaaagcaacaatttcaagtgatttgtttcatcttaggaacagcaggaaataattatgcaatggattatagaagatatattctgaacagctaaaataggaagcacatatcactgtgtgggtgaaagaaagacatttttacaaataaaggtgcacactgctttttaaatagcttaattttttaattaaattttttattttcaataattgtagattcatatgccattgtgagaaatcatagagtgcactcatgtttctttttcctagattccctcagtgggcacatctcacaaaattatagtgcaacatcgtaaaaaggacaagaaacagagcaattccatcaccacgaggatccctcccattgcccttttttttgagagggagtctcgctctgccgcccaggctggagtgtagtggtgagatctcggctcacggcaagctccgcctcccaggttcacgccattttcctgcctcagcctcctaagtagctgggactacaggcgcccgccaccacgcccggctaattttttgtatttttagtagagacggggtttcactgtgttagccaggatggtctcaatctcctgacctcgtgatccacccaccttggcctcctaaagtgctggaattacaggcgtgaaccaccgcgccaggccccattgcccttttatagctacactcacttctctcctgcccccacctccaccttaactcctggtaactaccgatctgttatccagttctacaattttgtcacattaataatgctatattaataggatcacacagtatgtaaccttttaggactggcttttctcactcagcatacttttctgcagattcatccaagctgttgtgtgtatcaatagcttgctccattttattgctggatagtattcaatgacatggatgtttaaccattcacccaatgaaggacatctgggttgtttccagtttttagctgttatgaataatgctgctataaatatttgtgtacagatttttcagtgaacatgttttcatttatctgggataaattcccagaagtacaaatgctggttggtatggcagttcaatgtttaatgttttaagaaactgccaaactgttttccaaaattgctgtacaattttacatttccaccagcaatctatgagcttctctgtatccttgccagcatttagtgttgtcacaattttttattttagcccttctgataggtgtgtagtgatatctcattgtggttttactttgcgtctcccttgtggataatgatgttgaatatcttttcttgtgcttatttgctgccatctacatatcctctgcagtaaaacgtctcttcatgtcttctgcccattttctaattggattatttttatactattgagttttgagagtgctttataagttctagatattattctttgttagatatgtgatttataaatattttctccagtatgtaccttgtcttctcatcttcttaatagggtttttcacagagcaaaagtttttaactttaatgaagtacatttttttttaaccagaggtgctagtcacaccttattctttgatagagcataaacagaggtggggagggagacagtgcaaagggagaagggcaggctcttgagagcgaggttactggcatgcagtcaggccccctctgatttggggactatcacttcttaaacacgtgctctgtggccgttgccatgccaagctcatttatatttgggaggaaggagaggatcaggacaatttatttttttatggattatgtctttggtatcaagtataagaactctttgtctaactctagatcccagaaatttttttcctatttttttctaaaagttttatagttctatattttaagtcaattatccattttgaattaatttttacataagccatatgacttaggtcaagtttcaacttgtggcctgtgtatgtccaactgctccagcaccaggctatcttccctccactgaactgcttttgtacctttgtcaaatagcagtcaggtttatgtgtatgggtatatttctgggttctctcttctgtcctattgatctaagtgtctatcccttcactgataatactacattgtcttaagtactgtagctataaaataaatcttgaaactgggtagactgattcctcccacttttttcttctctttcgatttttttttagttatcctagttactttacgtatctatgcaaatattagaataatcttatatttacaaaaaagtgttgctgtgactttgataggaattatgttaaatctaaatatcaatttggaacaatttacatctttgctacactgagtcttctaatccataaacaggtatgtctttccacttctttgaacattttttttcatcagtgttttgtagttttcagtatacaagacctgtacatgttaaagaggagttcaccgaggctcataatcaaactatcaaaaattaaagacgaagaaaaaattctgaaagcagcaagaagtaagaaacatatcacatacaaagaagtccaatgtaactatcagtggatttatcaggaaaaaccctgcaggctaggaaaggggtaggatgatatcttcaaactgctaaatgaaaacaaattgccaaccaagaatacttaaatcagttaagctgtccttcagaaatgagagagaaatagtaactttcccaaacaaaagctaagggagttcattatcactgggcctgtttcacagaaattactaaagggagttctttaagctgtatcaaaaggccactaattaataacataaaacatgcaaaagcacaacactcaatggtataagcattacagaatcacattcagaatactctggacaaaaatgttggtatgcaaagcaattttatctctagtacaatggttaatagacatctattaaaacaactataaataaaataatcaggggatacaaattacaaaatgatgtaaattttgacatccaaaacataaaatgagggatttggataaaagtgttagatttatatctaattattattttttctttttgtatttgtgattataaatgaccttgtatttttaatttctgtgtatatatgttcataactagttcacagaaatacaatttttttatgtgtatcttgcatcccgtgaccttgttgagctcacttattagtcacaggagtgctgtttttgttttgttttgttttgttttttagcttgcttcggatttctacgaagacaatcatgtcatctgcaaataggaagtttcagttttcctttccaaatctgtatgccttttatttttttgtttttcttcttggcacaggttagagcttccagcactatgttgagtgacagtggtgagcacagtggacatccttgctttgttcctaatcttagaaagaaagtcttcatgtttttaccattaagtataatgttagctgtagattttttatagatgctcttcatcaagttgagaaaattcccctcaatttctattcttttaagaggtcttaaaaaacaaaacaacatgaatgggtgttgaattttgttgaatgctttctgtgtatcaattaatatcattatgtggattttcttctttattgatttcaaatattgaatgagttatgcatccctaaaataaacctcactttgtaattgtatataattttaaaaatacatttctgaatactatttgctaatattttgttaggaattttttgtctatattcatgaggaatattgctctggggtgtgggtgtatgtggaattgggaatactaggtcataaaatgaattagaaaacattcccccattttcttttttcaagacaagattgtttagagttagtgttaattcttctttaaatgttgttataattctccaacaaaacaatgtgagcttggagatttattttttgaaagcttttttgattatgaattccatttcattaatagttgtagggctattcacattatgtattacatattgggtaaattgtggtagtttgttttaataattgatccattttagctaagttgtcaaatttatgtatgtagaatagtttgtaatattcctttattatccttttgatgtcttcagggtctgtagtgacatccctattttattcctgatataggtaatttgtgtctttcttttttctctcagtttcactttaagaacagtaggaaataacaatataatgatttacagaagatatgttcctagcagccaaaatattaataaaagcttatattgctgtatacgtgaaagaaaatttttacaaataagagtgggcattgcttttggtttttaacttctcaaaggtcattctgctttctaattcttgtttttagagatagggtctcactctatcccccaggctagagtccagtggtaaaatcatatcttactgcagcctcaatctcctgggctcaagcgatcctcccaccttagccccctgagtagttagcaatacaggcacacaccaccgtgtccaactaattttttaaaactctttgtagatatatggtctggctatgttgccaggttggtctcaaattcctggcctcaagtgatgttcctgtcttgacctcccaaaatgctgggatttcaggcatgagccagcacacccagcctgctttctaattcttaagtcatctctttactattatagtaatagtgcccatgaaatacattctgtttcaggtatcctacctttttttcatctaaatcctacaaaaactccacagatgggcagacagggaaactgagtgtcaaagatactcagtaactattggacagctttagaatccagctctctcaacacttaaaagccatgaatacactttccattacatcattctgtctttttgctataattacccaaaatgtcttcctatacaataaaaataacagaacttttttagcttaatgatagtttaaaagaatattttccccagagtatctgtaaaagcatttaccacgagggttatcacaaagtaataaatatgttagtaggtagaataaagttaaggtttaaaccagaaagatgtgacaatataagtacttctgtgaataaatttaagatggtgtgaagttttaagaataagcacatagcacttcccctggagtaaaatataatcagggtcataaaaatttgtgtcataatatgatagcaataagttttaaagtgaagataagtattacaattaattttagctaacaagttcaactccttttctgctatttttctaaaacagttataaaaatgcccattaataaaagtttgtctttttttcctgactcattcctggcaaaggaatattcaaaaggttgatatgaaggggtataagtatataaagcaagtgttaaaaaatacataaactcagtaataagcttctaaataatcaagaattgttatgatttgtatgtaaatttcatttggatttccctcaaggaaacaaaatcattaagttctgaaatagtctctaattctaaaactcctttcttcatcttcatatcaatgaaaaaattggtatcctcaattaaaaagtacctttatgtttctaactaattcctatgggttaaacttattaacacatatttgggagacaaaataggatttgcagcaaagtagaattggattcagatcctaatgtcggtatttacagtttagtatttgcattcacaaaatgaggattatataagcctccccacagaattattgtctggattaattgagataatgtaaatgaaagactagaataaggcctaaattagtaaaggattgataagtattcatcttcttctcccactgtaatattttagtataagtaggatctaactgaaagaagacattgatgagttaaatcataaggcagccctcctaataaatggcagaatcaccaaattacatgaacagtccagcagaatctccctgacacaatttacagaggtgaaggttgaaggaaaagaggaaatcaataggttcggaagaaaatacagcacacagacttattttatcagtgtttaagagagctgccctggaaattgcagtaagagctctaagtagaaaccttccgggggcgtctctgatgggaaataagtggcagagaccctggtagaacctctctaaatagcccaccatctctgatttggaggagtgagggctcatggcaatgagggaccacaaagaagggggaaaaagaagagaagatacactccaattaatcacaataagcctttttagaaagcatggcattaggaggttaaagagcccctgtggtgacttgtttacaggagcagaaagttaagaggctgttaggagcttgaagaggaaacatcagacttcagcttctgagaaagaagttagtcattagacatattttgctttagaaacaaacccaagtgatatagtttgaatatatgtccccatcaaatctcacactgaactgtaatcctcagtgttggaggtggggcttggtgggaggtgactgggtcaatggggcaaatccttcatgtcttggtgctgtcctcgtggcaatgttttcacaagatctggttgtttaagtgtgtggcacctccccaccaaccccactctctctcttgctcctgcttttgccatgtgatgtgcctgcttgcacttcacaacttctgccatgagtaaatgctcccttaggcctccccagaagccaagtagacggtggagccatgcttgcacagcctgcagaaccgtgagccaattaaatctgttttctttataaattacccagcaaagcaggcatttctttagagcaatgcaagaatgtcctaacacaccaagcaaaacataaagatggatgttaatgtgccctggtgcaatggcatcaccaaacacagataagacagcacaaaataattcttcttgatgggactgctcattcatgactctgtcatcttctccacttaccagatttaagagaaataaccagcactatccaatattaactaaaagatagatgccattctttccctcaagcacctcatattttagtgagaaagctatgaaagaggaaggtgaaaagtcctatgaagaaatagaacttcctatgaagacatataaccagggatctaacctaatttggagtgtaaagagaagcttctttaaggaagtaatctttcagctgccacctgaaggagatgtagaaattagctaagtgaaagcagtgtgagcgggttaaaatgaagtgtccaagtcagaaggaacatgaaatgccgtaatcctgatgtttacagcaggaaaagatacagacagcacatgtaaggaactaaaaggtggttgatgtgttcgggatacaaaaaggaagaagaagagagagaatgggcacatctttccagaagtttgtgaaatcgaataaaatttgcatagctatgggagatactattctatgatggcattgacttgagtacattaaaatgctgatggaaatgaggtggtaaaaagagatatattaaagagataagaacaaaaaggaattgagagtaaaaatttcctacaaaggaggtaagggtggaatttagagaatgtgtgaaaagtttgatgtttagagaggcagaggaatgccttcagtttaataggatggagaaagaaatgaagaggttcagaaaggttttaaacattttttggcaaagtattgaggtaattccttgttgatgacttccagtttctctggaaagtgaggattaaattatctgagtagactaggaggaaaatcaggtatctgtgaagagtaaaattcaaaagtcattaggaaagttggcatgcaagctaactggagaaatttaggtctgctgagtagtgttaagggcccagaagagattgagaactatgaatttataacattaaaataagattatgaaaaaattcaacatcactgatcattagagaaatgcaaatcaaaaccacaatgagatatcacctcacaccagtcagaatgactaatattacaaactcaaaaaataacagatgttggcgaggttgtggagaaaaaggaacactcatacactgttggtgggagtgtaaattagttccattattgtggaagagagtgtggcaattcctcaaagacctaaaaacagaaatacctttcaacccagcaatcgcattactgggtatgtacccaaaagaatataaatctttctatcataaagacacatgcacttgcacgttcactgcagcactattcaccataacaaagacatgggatcaacataaatgcctgtcattggtagactggatttaaaaagtgtggtacatatacaccatggaatattatgcaacagaaaaaaaaaggaatgagatcatgtcctttgcaggaacatggatggagctggaggtcattatccttagcaaactaatgcaggaacagaaaaccaaacaccacatgttctcacttataagtgggagctaaatggtgagaacatgtgaacacatagaagagaataacacacactgggacctattggagggtggagggtgggaggagggagaggatcaggaaaaatagctaatgggtactaggcttaacctgggtgatgaaataatctgtataacccccccaccccgacacaagtttacctatataacaaacctgcacatgtacctctgaacttgagggttaaattttttaaaaagattatgaattgattaacttctcgacttaggcttttttctattttacctgaaaataaatgaaacaatttattagtctctcactatttactcttgcacatatacatatatatccatatataaatgagttaatgcttttgcatttatttcagtgtaatataataagtagggaaatacgatgtgtgattattatatagttattatggattatgtactttatcaatataaaaatcctatttattcctatgctttttatctcagtggagtccaaggattaggccatgaaggattgaaagattcagagcaatgttccaggcagaagcgtatgttttgaaagagcatgctgcttttgaggaagtaaaataaatctaggtttggaatatagactagaagagatcaagaagtaagaattaactccagaaataaacagaaacctggtcatacagtttgatggctttaagttgaccaagcaatggtggtcaaacctgtgcttagctaggcttaaaagctatgaagtaaatagacaggtttgaaaaaaatagactatcactttgagaaacaatctggattttatgtgtactattttatttaattttttcctcctgtacaggtagcagaaacacacacacacacacacacacacatacacacacacacccataaggaaaattttaacttgtctatctatctatctgtcatctatctgtctgtctgtctgtctgtctagttaaagcaaactaaatatggcctgagaaggactccatacttccatatttgaatccttgtggatgaaccataacctagcttaacaggcagacaagatgaaaacctaacttaggagtatgtgcctgtaacaatagctgagtcttggccaatcacagcagccatacctcaaccactcatagactgctaagtgttcaaacagggttcaattaaggcaaaagccaacctgtaaccagccgtttctgaacctcacttctaagttcttttctgtacctcactttcctttttatgtctataaattagttctgaccacgaggcacccctggagtctctgaatctgctgtgattctgggggctgcccggttcacaagtcattcattgctcaattaaattcctttcaatttaattcggctaaagtttttcttttaacaatatataaacacacacccacagttgtacatattacaaatttgcaaataatctgtgtatatttatattcagtttattttgtagttaacagttaacatttttatagttaccatataattaagttattcatatgattaaattagctttcaaataatttttaatatttttaatattctatcttccattcaaacaaaaatttttattctaattcttttctgttataaatagtagtacaatgaattattttacagaattgtttcctctttctgggcatttcattggtacagacaagaaagtactagacgaaaagtagtatgtttttcaagattcttgattcacattaccaagaaaatgtatagaaacatttccaccattgttctacaagactatcagtctgtgcctgcatcaccatgaatttaccatgcatttgctaagcacaggatatatttttgtttttaaaaagttttaactacttcttaggttatgttataactttattgtgcatttccttgatattcagcgccattaatcatttttccttttatttattattattctttttctttcttaaattgggtatttatattgtttgtccattttcctctgtggatgtgttagtcttctttgtggccttctaagagctctttgcatattaaaattttaacagtttcactgtttatatttatctctatagcattagttacttgttttctattttaataaagtttttttgatgcaaggcaacttaatttctatgaagtcaaggctatttatcttttcctttggtattactttcacaacttttgtgttaagtaaatgtttgtatctgtaagattatgttcgaaatattgacagtgtgtgtctctatcttttcatacattttgttagttaatagagaaatgactgctgagctaatcatttgtaactgttgtgacagaagaaagtgaagtgtaaagatgagaagataagaaaatgtgtctctcagagttgttattaatcaccgtcaatatttcattagagtgcattgcctaatgtctgtttatgtaatttaacttttttgaaatagtctttttcctcacatattttgactaacttaatgacccacttaatttattatttcatgtataattgcaattattatgtagatatccgtttgtgttgatatctctgtttttttaaatggaaattaatagaagatataaaatacttttggatctttctgatattcaaaaaatatttttgagaaaaattatcttaaatagtaatatgatttggtacttgactcaattcaatttagcatttattgcttgctgtctcatacaactgttctaagaattcatgtcaaattatatcagttattcctgtgtccatttagcatatatttattgtcaagttcttggctaaagcaagaatccaagaagagaaatttcacagactagtaagagattatttgcaatttctgctttttaaatagtaatgtaattaatatactttccagaaaatttttccatcttctttgatgcataagtagactcttaaaatacacatataaaattatgtgaaagtacacataattctaagaaagcatagcagaagggctagagacccttatatttaactatctacattatatctagagggtatctaaaacttatacaaaccaaacagacatttgatccttgctccccagttccagcaacatcaaaacaaacacaatgaaaatcactgatttttgcctagatctcaccatttcagtaaatggcatcgtgatttttcacagtgactcaagccataaatctggacatgcttgattcgtaacctgtatctcctaaattcaactctatggtaaatattattcattctactttgaaaacatgttctaaaaccactcatttccctatacttcggatttacccaccaatccaaataactgtacatgttctcttggacagctacaaaacgtcctaattgtttcccctatttttccctccataaggtattctctagccagagtgatcttttaaaaatgtagatcaaatcacatcacattcttgcttaacacccttcagtggcttctaattgcacttggagtaaaatctacacttcttaccatgacctcattggctctctgtcttctctggtttcatctcacagcactttgccctcacactgagctccagtcatgcatgccttctgtctgttcctctgctccaagttcatgtcttcatctgggtctttgtattgctatttcatttccctgcctggaacattcttcctctgactcttttcatggctaactgtttctcctcattcatgttccagctcgaataccacctcttcagagaggccttctctgattccaagtagtgactcctcctccaaatactgtttgactctgtgtagttaatttacagccctgatcacaatctgaagttatattctctatttattgttcacttgatcattgaatatttacctcctcttgaatagaggctccttgaggacagtgaactcttttgtcttgctcactgttattacctgtactatgatgaagcctggtaaatagagcacacttagcaaatatgagtaaaacggatgaatgaataagggcatctcagtgaagatggggtgagaaagggttatgctagctggtgcttggatcctacctaaaagaaagaacagaagttaaccaggtagagaaaaagagggaaatgcattctagactgtatcggaaagggtgcaagaacaagtctcctttggagagttgcaggaatttgggatgattgcatgttggcattgctggtgataaacaggagcccagtgcaagaacatttatggacttttatgccttatcgagtaagaagtttagaggttgtcatgaaggtaggaaatcctaaaggatgttataaaagtgaataacataatcatgttgacaatgtaataagatcactctcctcacatgggaaggagtctggcattgggtgagtagggtatccttgtagggtatcctcctactggcagtgtgaggaggtgtccacatgtggagggcagccagggtagagtcaaggcactgtaaaggtgagaagggtatccatcaggggccaaccaggcatgaggaatcagagcatacacaaagtaaggagcagggtggatgtgtgtgtgccatgccctgagcaggaggtgtccatgtggagctttactggcatgcggtatcagagcccaagtgggatgaggccagtgtccacatttggagatgaccctaaatgagaatcaggacctgatataataacaaaatacactatgaataaaggaagctaggtttctgactgtcagagaatagaactacaaatataaaaatgaattatgtgttgtttagatcgaaatcacattacttctgtaaactcatggctttcaatatatgttgagatggatggacacagaaatatagatgttcctgtgcatgtgtatatttgtgtatacatacccagacccacgtgcatacgtatatgtacgtactatgcttatatacaaatattctctagccctgcccactgagagagtctgagaacagtgacatcccagtagcaattaatatacgtagtgcctaaatcttggcattaaactaccattttatactaagaggaagtaaagcttcttagagaaatagctgattccacatctaggactggaaaatcatatatgagataagcctagaaatcccgatgttccagaaagtaaggaatgctcaaagagtgatggagataagtcaaaaggacacaggaggactccctttggcaaaactctaaataattcaaatatcaaaaccaataataataataatggagtataactaactcaataaaataggaaacatgggtctctgcaagtataaacaaatacacaagtaaattgaacgttttgtgaggaatgggatattcacatagttttaaagtacctccccacaaatgtatacacatttcagaagagaaacaaacaaacaaacaaacaaacaaacgaagagaaagagtaaccttacaatggagaagtctgaaagaaaccaccttaatcaagtgaccaaggtgaacatcatttgaaaaatcattatcacaaatcaaaatcatgcaccagctgataggatgcaataagaaaaacagagtcatctctgggtttttctgacaaagatacataccctgaatctaattataaggaaatatcagacaatccaaattgaggaacattacacaaaatagctgacctgttatattcaaatttgtgattgcttttaaagtcaagaaaagactgaagaattattccagatcaaatgagattgaacaggaatgaaaactagaagaatgtatgattctaaactagatacttttaccataaaacatattattaggacaattggtgaagtttgaatggagtcttaaggttaaatggtagtaatatatcacaattcattatctgattttgatgtttgtgttctggttatagataaatatccttgtttgtaagaaataacatggggccgggcgcggtggctcacgcctgtaatcccagcactctgggaggccaaggcgggtggatcacgaggtcaggagattgagaccatcctggctaacacggtgaaaccctgtctctactaaaaaatacaaaaaattagccgggcgtggtggcaggcgcctgtggtcccagctactcgggcagctgaggcaggagaatgacgtgaacccgggaggcgaagcttgcagtgagccaagatcgtgtcactgcactccagcctgggcgacagagcaagactccgtctcaaaaaaaataaaaaataaaaataaaaaataacacaccagtgctaatgaggcattagaacagcaacttactcacaaatagttccaggaaaaaaaaaaaaagatctttagaaaaaaaagatctttgcattgtgtttccaacttctctgcaattttgtgattgtttcaaaatataaaataataatcattttaaaatccatgaagatcactctgtgataaatatagaagataaattagaagtagaagagatgacatcaaggaagccatgatgggagctatttcagtaatcaagtcaaaagaattaagacaggtacagtgggagtagaagagaaaagcttagaaagataggaaacagaagtgacatgctttggtggctaatttgatacagaaagagaagtagaggaggagtctaggtggtacagttaattgatataaggaaggaagagcagatttttggagaaagatgaagattttgatgtctggcaagtaagtgtagtgagtcttatcttccaaacactgtacgttacttgaccaaatgaaatacaagttattggcttattgttaggatgaacttctattctctggcttcatgtttccacaagaagggaataccattagagtaacatcctccacctattctccgactccttattaatttatcccctaaggaattagagttactgagctgtaaaacgacattggggaaggaactaagcatgcttattattgcctcttccatgtttctcctcttcagagacataataaatatgttctctgctcttctgtagtaaaatcaccttgtaggttggctagctgtgccagtgactgggttaggatgtgtgtctaatccaagagtgaagttacagcaagcatattcagtaacatatctagaatcacattgtccaatcagttctcatgatgataataaaaagtatggcatttggtttcaatttgtctaactcttggattccatacctcagttggttctgaatctgggagagaaagcaagcagtgtggttaatttgtttcctaaattcaaaacaattataaaactctgtttattcctcccagtgtctaatatagtgcttaatactcacttattgaattgagttcaattaatgtaaaataaaatgatgctaaaataatactgtcttaaaggcgaaaatataggtccttctaattatttgtttttccattttaggcatttagcaccattgatttaaaacttgttcttcaacatgacataatctaaagatacttatttttcctttcctcacagataaaacagaaatcataatggtcttatccatctcacgtggtttctcaaaggattaaagtagacagtgtgtagataccactctgtaacatcataaataaatggcatatttattgctgagtttgggtgttccctttctcaacagtgtgaatttgtgcaagatgagtggaaaatcaaaccagaatggaattgttagggtcagctataaagaggcctatgaaatgccctagatcatgtttttcaaattaagttttgtgcatcactagttgtgaaatatattaatgggtttacatgggtggtagcgaaagaaggctctgaaaaatcattcagtgaagaaattatttaaccctgtatttccccaatatatttgacaatggaaactttttatataagaacatcacttacagaatgagtaatccatagatattaggacattctgactaagaggaaggtggcagaatatctggttgggacttcctaattattagaatgccctaagtaaatcagcacagcacttaagtaaaaagattctaaatcccttgcttatcctattcttctccctggactatgtatctgcctgctacgatatggatatggcttagtttgtccccaccaaaattcagattgaaatttgattcccaatgtggccgtgttggcaggtggggcctagtagagggtatttgggtcaagaggacagatctctcatgaatggcttggttctgttctagcaatactgacagttccaagtctgccaagactggattaattctcatgggtatggagtaattcccataagaggtatttgttataaagccagacaccactggagttttgcctcttcacatgttttcactttccctttgaccttctgccatgttgtgatgtatcaccagcagctgggcagatgtcaacacgatgcttcttgtacttcccagcctgcagaagtgtgagttaaataagcctcttttcttagttcattttatgttccatataatggaactcccaacctcaggtgttccattatagcgacacaaagtgaactaagacttcacctatctaatgcctattcaaacataaaggtcactttgagcatttcctctctggaatagtcttcactgccctttccccaactattcttaattaattcaggtggtacttattgacagccagttgtgaaccaggtactgttctcagtgccgaaattgagcactttataaaacaaggaaggaaggagggaggaaaagagagggatggaaggaaggaaggtagaaagaaataaaggaaagaagttcttattctcatggcatatccattccaggtgggaagaaagacactgaacaaatcaacgcataatgttagttcgggagtgaaaattgttataaaggaaaatagcataacagagacagagaataaagtggtagctactttatattcaatggtcaaaaagggcatctctcataaggtagtatttgaataatgacctgaaggaaggatgataattagcagtgttaagtctctgggagaagggctttccagacaattcaatgataagtacaaagaacctaaggcaggagctgtttggctaatctaaggtactgttgggaagatgacatggctagtgtaaattaaacaacgtggagaacggtaggagatgggttaagaggttttagagagtcagattatattggatgtcatgcttctttactttcagtgagatgggaagacattggaaggttgagcaggtgaataacgtgatctgatttatatatgtggccaagttacaaaaggacaagagcacaataatcaatgccagtaacaagatatgaagctttttcaaaggtctaggccagagatgttagtggctcatacaatagtgacagatgacagatggtaagattcaagatatatttttaaagaaaagttagaggactgatttttgaactttttggtctcaagatcccttgatgcccttaaaaattaataacactgaagattttttgttcatgagagtcatatctgttaatatttatataaaaactaaaaataaaaattctttaagcataatacacaagtgcgcattccattagccatcagaggtatgatgatgtcatcacttaccatatagcttctggaaatctccatttagaactcatgtacaaataaaagcagaacaaggcaaaatgtctttgtattattatggaaatatttttgacctcacagacctttgaaaaggttttgaagcctgctaagaggtcctgaaccacacattgagaactgctggcctagaggatttttttgatggaatggatctgaggtgtgagagaaagaaagaaatcaaggatggggtcaagtttttaagcctgagctgctattaactgaaatgcaaactgcagtgctatataagttaagtttaagacatcccattgagatttagggtagcctgctggacatgagcctggagttcagggaagtgggcaggcctggagatacaaatttaggaataatcagcacataaacagcattgaaagctctggaactggatgagaacacatggggagtgaaagtagactgagaataggtctgaggatgatccttggggcattggatcaatgaactccatcagtgaaattccaaaagttctctatttagagcacagtctcctttggttggttaaaagttattttaggatagaatccatattttagtcattttcatactcaaatcaccgcttaagatgcccagcatatggtaggcactcaactgtgtttattgaataaataaataaattaattaatgatgtcctttgtggtactttcacagctaaattccagaattttagaacaggcaagattaggaagttggaatgatcaggttcagattcatacagtaggtatactattcattgtatagtcaaacagatttccttgaacttagaggaagatgtaattgactgcaccctgtgctgtcaataataagtgacctaaagggaaggatagactatatttcaaattctagtctgccatttaagatatttaaagcaataatgccaactctactttctgatcattttattttgcaaggaaattttttcccagaatattttttctttctatgcattcttttatttaattacacaataaatttaaccagctttacagaccaatacatatatatctacaaaggatgtatttcatttttgatgaacatactatggcttatttaacaagttatccttactaataggcattaaggtttccaataaatatttcaataatgaacatccttgaacatatttttatttatttattaccattttaataaccacatttattttcattattcttatagcacatctattcttagccactcatgtgatttgaaaatacttttatattaaatgtctatttaatcaatatttcctcatctttataatgattcatttgcatctcttccaaaacttcaagttaatgtctaaactcaattttcttttgtttctcttcttctatttttattttaggtgccaggggtacatgtgcatctatgctttctcattcaggctgtctagacatgctctaggggaaaaagctgagccaaacaatgacacccactgagaattttatgcatgtgggagaaaaacccctgaataacacaaaaggaaaacacaatattaatacagtcttgctattactggcaatgtgggcacaaagtataaaaaattacatttcatgtttaggaaaaaagatgaaaaaatttttttacttgtagaaagtgccaaataacaaaaattctccatattcctgtaggataaactcacctggaatttcatcaaatgaatagaaatgaggatgaataatattccactggcatataattggcatgaccactatatggattgaaggtgattttaatcatcaatggaagatacaatgtacagtggttgttttctggattccggcttttccctcccctgtattaggtcagcctgaccctgtactgtgccatttatcctcactgactcctcccatatcccaaattccaggagtttatacttcctgtggctcacttaagcagaggcatctaaagaatgagatgcttgaaggtgagtatcaccccatatgtagccaacatcttcttaagtaggttccaatgatttagggaactttaaaaggttcccaaatacattttctaaaatccacagttgccatgatcagagctacttggggatgacacagagagttagaacattacttctcagaggtcttatttcaattgtaggcaaacatgatctaatcaccattataataacaagttgggccactacagggctttacaatgtacacagcaccatggcaccttttatctggtttgagtctgactacacccctgagaagcaggcaaggcaaataccattctcactttgctgaaaaactgagggtgagaagggtaatacagagtgcatgtgacagaagaaaggttggaactaaattccttttaaagaggcacctacaagcaaaattttgcacataattccaggaattgtgtagaccacccatagcctatccaagaacaccaggttaaaaatatttgccctcagacagactgatttaattggtcaggggtggaactcaggtatttttttaaaaagcttcccaggaaattcatatttgtccaaaactacttcaaaaattcatatttgtcaacgttgactgttgggtcctgttgccttctttctcattttttttcctttccaaatcgctctttgttttacttaatattattttctattacgtctatctttctgtttttagccttctcttctcactcagcttttgttgcaagtctggaaattactgaatacagtcttctttggctctttccttcagactacatactactgccatctatgtttctgttcttcctcctttttcaaaactattattctctcctgaagcttcacccttctagaatatcagtattccacctcgattattttctacctaatgagctaattagcattaatggaaaaactactgaagttaggaaatcagagatcttccagtaagtcagtggcctcaggcccaatcagtaaaataaggaaaaatatacctacctgatagaatttttgtgagaaacaaatgaaacacatactcaatcatgggaataaaatactcaatactcaataataaaaatatttttaaagactatctccttgaagttctttttattccttatctattttttgctgcaacccaatacaatattctgtactctttccaagttatatgcctctgttttttacatacccactctcatttctaattttaaaatttagcatatgtattctataaccccacagtgcccagaaaaatgttattctggatttggcaagaattttttgtaaccccagttctaaactgttaataatggcagggagaggtgctatggcttattattaaactgctttattgttagctcattaatcatacacaggtccagaagaatattcaaaatgtttctttcaggttgagtaggtacctgatctaaacatggtccattatgagtaggtgttcagaaatgactcatctttcctccaatcatctcctttagtgtcttgagagctctgagcctttgacctttctccttattttctttacctctacagcctctttgcttctttttgctatggtccctccttagctgcaaaagaatgcagcctggtgttatttcattctattgaattccatttaggatgaggttttgggttagtggtgaggtttggatggtactaggaacatctaaagccaattggaatgtcttttccggctgctattaacaaataccaaaaagttatggggtctctcccagttctggaggttgagaagtccaagatcaggtttccaccttggttgggttctggtgaaggtcctctttcagattgcagattgccgagttcttgctgtgtcctcatgtgttgcaagggtgaacaagttcccatgggcctcttttataagtgaactaatcccattcatgagagctctgccatctgacctaatcctctcctaaaggccccactttttaatactattacattggggatttgaattcaacatagaaatttggggaaaacacaaatattcagatgatagtacagaatttcaaattttccagattgacttcttaggatattcttatgctcattatgctaaaaatctctgttcaatattgagcccatttagatgacttgtctgtggtattgtgccaaaatagcctctttttctgcccgtggtcacttctcaagagcccccttctattttagacttgatttctatcatgaaacagggaaaggagtgtaaaaacccatctagctaaaaccaccacccagagcacagaccaggaatccagtgctctgtcaactgctaatgttagtttgtttgaactttggaattaattagatgtatacacacctcctaacaaaatatttaacaattgagtccctatcattcatgtctcttcagtcaacttttaggctcttctttctcattctctgcaaccagaaactgtttccccacctctgctcatcctttaacatgctgtcatactgccttatttccttttaccatcaaactactaaaaagattagtctacaatcagggtatcttttcccactcttcaattcctttcatcttaagcttctacattcttcacctgaaggaaattgcattcttgaaggtctctgccctcataattgccaaataaagtgacattttggtctctcttctcctctatcttcctggaagttttgacaatgttgactaatcactttaaaattttttttctttatatccacagtaagagttgtctttcttcttttatttttctcaatgattctctctctcttttttgctaaagacttctttctaaagtacatgtgaggaaatcacttaagttcctggttctcaacttcctcacctataaaatgaaaatatccattccaaaaagaatcatgaacattaaattatattaggtactccaaaaatataattatcctcctttagtgtaaacatttatcagaattctgtctttggtactatctctcttcatcattgaattttacgaatgagaataaaatctttaccttaagccctcaactctctccagaaccccataccaatatttccaatttgtatatcatgcttcatgttcagtaaatctacaaaaccaaacttatcatgtcatcttctccctcatcaaaataaacatctgttcaattctttcctatccttattagtagcattccaaagtcccaatcaacaaggctcaaatcattagtcatctttggctcccttagacctaatccatctatctactgctaattctttatccaaagtgtctcttgcaccaaagactacataaaatgtataaaacattatagccaagtgttacttatattagcatccaaagtaaaacaatgtaatctgccatatcaacagaaccaagagtacacgcaataaactgatagcctacattgtagttaatgttgaaacactgtaacattgtctgctttccccaaagatagggaacaaggcaataattcttggttttaccacttcattgcatcattttactatagtcacagcaataagaaaaagaaataaaaggcacaaatattagaaaaaaaagtcaaactatcattattataagatgacataaaagaatcctatggaagttattttttaaaaaagcaaacaagtactctagcatttaaataaaattaaaatggtaatataaaactcaactgcatttctacatgccaacaacaaacaattaaaatatgaaagcaataaataatactaaattattaactcagtaaataacaatttttttccttgtagcaaaaattaaatcttgacccccacctcacaccatacacaaagcaatctgagatggattatcgacctaaatataaaaaccagaacgagaaaacttctagaaaaaagtgggagcatatatttacaacctgggacaagtcacaaaaacactaaccatagaagaataaaatgatacatctgacataaaaattaaaatattctgctcatcaaaaggcacttgagaaaatgtttaggcaaatcacagagtaggagaaaatatttagagtgcatacacctgagaaaggacccatatcttgtggggttacagaagaatttataaagaattactacaaataaacaatcacaaagctgaacacccctaaaaaaaagaggtgagcagatacttcacaaaagaagatctaagaattggcaataaccacagaaaaaggtagtcatgatcattagtcaccagaaaaaatgcaaattaaaaccataatgagaaatcatttcacacccagaagaatggctaaaataaaaaagtttaaaaggcgagaatgtggagaaatgaaaattctcacacattgctactggtgactataaaatggaacaacttttttggaaagctgttgggaagctttttataaagttagctattcatctaccctgtgatccaacaatgccattcttatttatctatatgaaaacatatgtttataaaaaacacttacatgtgtatattcatagcatattcactcataatggtaaacaatgggaaacaacgcaaggatcaatcaacaggagaattaatgaacaaattgtaatataccatagtatattaatccaatggtaaaccacttaccatgaaagaaacaacatggattaatttccaaaccattatgttgagtgaaagaaacccaaacagtgatacgcacacagaaaacatactcaccataggattccatttatataaagtccaagaatagccaatcctaatacatgatgataaaaatctgaacattcttgcctccaaggcaggaaggagggcaactaattagaaaggggcaagaggaaactttctggggtgatggcaatgttctatattttgttttgagtggtgttatacctatgtaaataattaaagttcatcaagctatatacttaagatctgtgtatttgattcttcaattgtgaaaaacaagatgtttcacgaggaactattttaaaaacaaagccaacacaagtaacatataactattcagtaaaaagaagataactagaatgtcaatagacctacctaatatatatttcaaagatttttttttcaagtatttaagtacaagtaagtagaaaaattcaggcttgtgggttaatatactggagagaaacaaagagaaaagagtaataaccatttcagtcactctgaatttgaaatagattgcttcacaatctagaggattttaagacgtgaaataactgaaagaaacaaaggtgaaaaagatcaaacacaggatgcagaactaacagctgtgacttagttaatgcatatgctgaataaaaacaaactcaacaaagcactgggaagccggcagcttccaagtaattaactaagcagaaacacatgcaatgtgttatcagccctatctcatattgaaagcaaggactccttcgttacaatggatgctctccatttacaggtagagttacaagaaaataaactacataaaggtatacaagaggcaaaggaaaaggaaccaatttgctacatctaagtagtatctattttcagtgaatgagataaaagttctgccgttacctcacctactcaatatcagtcttcccacaataaaagactgaacacatcagctaatggtcaaagaattgtaaattcatgaataagggtcacatttacatttttattttcaaagttcaacacaagttttaaaagtgaaattatcatttcaatcatattattaatttttaataaataaatttttagaacggtctttaatacccataaatcaatctaactccacactttctgcattttcagagagaaaaccagaattaacaaatatgttagagtattaaacctgtgattaaaatataggcttttatataagttcatcaataattatcttttctttggaacagtagctctcaaccattttccatccctgacacacctgtgatttgtcagaacacagcaggagtctcctgttctatccatccatccatcctctatgcacatcctctagtcttcaaatcctttcctgaaacctcatgtcctacctgaatactctctcataagtatttccatgtgaatatactactccctttctacaatgaatgaggagccccctgaaggtcataactcatatggagaaataagtcatgcaccaatgtctccagggtggaagaaagagtagcctaattgaagttatattctttctgcaattatatatagagaaagaaaatatatagatatatagctgttattgttctattacataaatacaggctgcattggttctaatttaaacaccatcatcctgagttacttaactttctcacttatttgtttttctccttaaagcattgttataacatttaagaaagatggagtcagttactaagataaacatttaagtaacgacagcaccaagaaattgggtcaagatggaatttctggctttaattctacctctagatttcttcaaagataaccaggtgaacctaaactcaattagaatatgcagagaaggatttatgaaataatgcctcagttattcagatcatggatctatagaaaagaatctgtttttcattcattgaatgaccaagtgcatttacattagagaatctacattggtataaaaacaaatatatttaataatgaattttattaacatatataggacaatgtcttacttaaatagctttaaaatgctggaaatgcactagaaacacattaaccccagaaacaccttcatatgagagaaccagtgtcaacgaaaatgacagatagcaactaaatctgggtttagtgaggtttatcttgaagcaaatagaccccatcaaatttccttgaaaaagaggacattttgtaatgagatgaaggtgtcactatgttacccagactggtctagaactcctgggctcaaggtgattctctgcctcagcctcccaagtagctaggattacaaccgtgtgccactgtgcctggcagaagacgacatttttgaaaacatttttcttctccacatattggggcactatgtcaaatgttacctgtgcctaaatgcccctgaacctgcatattccatactcctaaagatgtgtcaaattatacaacctcatgaggatatttttaacctctgagcaggactggaagaggcaaatatactaaagtaaaaaaaaagaaactccaaatcagttggacaatgtagcccctttggagtgccagtgatgttatctataaacactgaaacacaaattgcacttgaattgatgaaggatataggaaacaatttatattaaagtgttctacaaactgcagtggctatccaaaatttaagtgccattttatcaatgaggatgaagattataataaaaatgatctaaaataacttatgttaaacaaggaaaaatattaaacaaatcttgcttatttagacctaaatagtcttaaaagacacattttccctacaatttggctcaaaggatttattcatactctatatctaagtagatgatgaatggcattgattgaatccaaagtcctcctgtcttggattttatgaggcccattcagaacgagccaggttgagaacaccaccaatttcgtgttctgggtccatctgttggcaaaaatataatgcaaacagctttataagtgctattttcaatgaaatatcacagaacagcttgtcccaatgatatttctaaagcttgcctgcaaaccgcctactggaaaatccaactgaaagagaagggagaaaagagagaaatccatagaggaaagagacaggaatggaaaaaagaacaaaggataaagagagactagctagaggactgggaacactggaggaaaacaaggagcaatattaaacgcagacaatattcattgaaaccataagaatagagaagatagagaaatataaaaatcacttgggttggaagacagagaaataatcacaaaccatgcagcattgtccagaagaatgaagacaaaaggatcaggaaacaccagaaaatatgtaacagctcaataattggagcataattattaaaatgttgtgagagaaaaatgatgtaaaatagctatttttctaagtctcactgcttcatgtaacaggcacaattcatttttccaaaaactaatgcagatttcagtgtttatcaccaacttgaaaggaagcaaacatcctcttctgagtcccctcttttaatttagaaatccattgacataccacataaaacagtccaggcattgcaatataagtgatgtacatgcattgattcaaatcaaaacacattagagggaaaatgatgccattctgggcacttacctggggtcgaatgacttttacaatatttttgagggcagtatcaggggatggaggtgaacaatcaggtgttgggcctgttgagctgtttctatggttactagttcctggagtagtaactgctacctcagaggcattatctgtgaataaaaatagaactgccatgaacctaatcactcagtttaccttttaagacttgaaattaattttctgaacataaattgagatttcaacttttaaaactggtatcaattacaagatcataatgaggaatatgctcagtagtatattttaaagataatgctttttgaatgctttgtttccttctaaaatggtaactatcaccccctggaatgttgttctgagacaagtgtattattattcaattcataatgatagattatccagcatagctcttaagactgctactactatatgaataactaaaaccttaccttaactaaaaagaatataattttatgatatgattgggctaaagctttcccaataatctcttaaatgagtattaatatttattaaagtgggagttttatatctccctgatgcataaaatccaaattcaagcctcctcaaatgacttttcctagaaatcccacaaactatagaaaagcaccctagtgaatgaagcttgatgaaaaactgaaatttgtgcaaaatggttttatgatgtagataaacacaaaattatcactcctagataagtatagcaacctatgtggtcaaagctaaatgaataaaatttcagaatctaaattaatcttctcttatgttcagtatttaggaggggggaataaagaaaagatgacttgaaaatcaacaacatgtgtaacatttttttcttaaattcatattaaagcaaaataacatcaaggatgccattttagaatgtttaaaatacttgggaaaggatgaaaattattctataaataacttctggtagcacatagaaaagttattttaacaacaatttggcaaacttcaatagctttttatgaaaactgctgcaagctcaaatctgccaaaaaaataaaaaataaaaagtttacttctctgttgtttttaattagttcccaataattttctttcctagacagttagctgaactgattgcaaaagagactgagactgaattttttatagaccaggaagtttctctgttcctgatcgctgtctacaatccccagtgaaatacaggaattcatcaaggcatcttttcctcataaaacacaaagggatgaattatcataaaactctacctaccatataaaaatataactcagtctcactgaggaatccagacaaaggcccataaaacaaaaaattcaagtatgacacatagaattacttggatgactcataaaataagtcttaaaagtgtccagagcacactcttctaagatttaacagaaaaggtgggatttgaattggcatcacaaaagagatggggtggtcttctgagtagattagaaaaccatgagtcaatactgaaacacacaaaacattagtcagcaagatgctctgattctctccaacctatcccttccttctttcattcatctaaaaactacacatgtaagaacacttatttggggcaactatgagtcaaatattatgttatgttctaaagattaactaggaagaatctctggccaaggactggaggcaggtagggatgaataggttaagcactgaggattttcagggcagtaaaactattatatttaacagtataatggtgagtatacatcatcattatatatttgtccaactcatggaatgtataaatcgagaatgaacctgtataaactataaactttgggtgataatgatgtgtccatgtagtttcatcaattataacaaaggtatcattttggagcagaatgttgatagtagaggaggctttgtgtatgagaatatatgaactttgtaatttctgctcaattttgctgtgagtctaagaagttctaaaaataaaatctatgaattttttttcaaaagaatccctgccctcgagaagtatactgttgggttttttccttttcttttttgagacagggtctcactaccatcacccaggctggagtgcagtagcatgaacacagctcactacagcctcaacttcccaggctcaagtgatcctcccaccttagcatcctgagtatctgggactacaggtgcacattaccacatctggctaattttttgtatttttagtagaaatggggtttcgccatattgctcaggctagtcttgaactcctgagctgtagtgatccacccacctcaacctcctagagtgctaggattatagccatgagccactgcacccagcccaaaagtatactcttaaatgtgtcatcagacatgtaaacaaattacaatgcaatataacttgagaactgataacagataaaggaagcatgataaaaaaaaaacagggtggggtgggggagtaatcagactatggcttggacagaagatagctgtgaaaggcttcagttttcaggcaagaaagctggaacaaaacattagatattagggcatgaaggtaggaagagcacagttgaagctgttatttcatatacaaaaaaactggagataagtttgaatgagtgaaaggaagttttattagaatataaacatacttaattctgtaggcaatgagaaatattgaagactgagcagggagtgacataataatagataacttttattgagcatttattatgtgcagacaagccatgttaaattattttacttattgaatctcatttaatacccaaattaacttacaaaatacattccactatcaccatccctattttacagagaaactcatctcaaagttatattctcagttactggcagaaaaggattcaaatttcagactgatgccatgttacccttctgagagttagcatgtcatagcaggtatgcaaaagatatgcataggtatgattgggttcatagaaacatagcctgaagaagatcggcatagttgaggtaggagcacactctacttcaaaatatagttgaaccaacttccagaaacttaaaaagtagacatagacactatgaaaaataaataataaaaacaacaaaaaagtcaaccataaaaacatctttagggtatgcctttgagtactatatagtataatatttaatatttggaagctggaagatatgttaagactagagacccaagctagaggtcatgacgttagcattttggagttgataagtgattagattctggacatgtgttgaaatgtccagaactgttgaaatagaccaagaatttttttgatggctcctgaatagacaaagcaaccttgaacaaaaagaaaaaactgagcacattacactacctgacttcaaaatatactacaaagctataataatcaaaacaacttgatgctggcatagaaacagacacatcaaccaatggaaaagaacagaaatcccagaaataaatacacatatttttggttaatttatttcaaaggtgccaacaacacacaatggggaaagggcagcctcttcaataatggcattgggacactggatattcacatgcagaagaataaaattagaccttcatctcacactatatacaaaaactaactcaaaatggattaaagctgggtgcaatggtacatgtctgtacttccagctacttgagaaactgaggcaggaagtttgcttgaacccaggagtttaaggccagtctgggaaacatagggagaccactctctaaaaaaacattttcttaattaattaaagacttaagtgtaaaattgaagtggtaaaactattagaagaaaacacagagaaaaacctccacaacattgatttgggcaatgattttttggctatgacctcaaaagcacaggcaagagcaaaaatagacaaatgggattatgtcaaactaaaaagctctgcacagcaaaggaaccaatgaagagagtgaagaaacaatttatgaaataggagaaaatatttgtaaacagtacctctgataaggagttaacatccaaaatatatggaactcaaacaactcatagtgagaaaacaataacctgatttaaaaatgggcaaaggatctgaatggacatttctcaaaagaggacatacaaatggccgacaggtatatgaaaaaaatccctaacaacactaatcatcagagaaatgcaaatcagaactacaatgaaatatcatctcaccccagggaaaatggcttttataaaaaagacaggcaataacagatgctagcaagggtgtggagaaaggggaaccactgtacactgttaatgggaaggtaaattagtacagccattagagagaatagtatggagttcctcaaaaacaaaatatagaattaccacataatccagccatcccactgctgggtatatatccaaaggaaatgaatcattatgtagaagagatatctccactcccatgttattgtagcattattcagtagccaagacatggaattaacttgtgtccattaagagatgaatggataaatggaaagaaaatgtaatatatacatacagtggaatactatgctgccttaaaaaagaagggaattccgttatcagtatagatgaacctggaggaccttgtgttaagtgaaataagccaggcacagaaagacaaatgacacgtgatctcacttatatatgaaatctaaacaaagtcgaactcacagaagcagagaatagaatggtggttaccagggactggggagatgttggtcaaaggacacaaaatatcaattagaaggaataagttcaagaggtttatcatacaatatggtgactatagttaataacaatgtattgtattctttaaaagagtagatcttaagagttctcaccacaaaaaaaatgctaagtatgtgaggtaatacatatgctaatcagttcaatttagctattccacaatgtatacatgttttaaaacagcttgttgtacacaataagtatatataatttttgtctatttaaaaataattaaattttttaaaattattgatgtgctggatatagggagagaaagagagaaatcaagaatgactctaaggcttttggcctgaggaactaaaaggatagagctgccatcagcagaaaagggacagactataggaggagcataaattctctaccatataacttccaatattgccttcccattctctctctccctttggactctattgaagtaatgctagacagactttattcttttaaccatttattctctcttttcattctgtctctctgttgcatttttaatagtttcttctatttattttctagtttattggttctttcttcagctgtgtcaaggctgctatcaaaccattttcttaattttagtagacttttctgttctaaaatttctatttggttcttaatcaagtatatgatgtcagtagtttgtattttttagttcctaaaaacattttcaagcttacttttatattaaaatggcaaatacaattggctttggttttttaatctgataattccagcatctaaagtctttacggatccatttctggatttgtggttctgactcatgcaatcctgttccgctgttagtttcatcatcaattctgtgttgcttattattcaacctgttgttacaagatacacatttaaatataactaactcttagtcttttaataaatgttaatttttaaaagcatcgaaacttatatcctaataccagatgctgaagtctgtgaacaacttgcctgtgtaacactagatcatttatttaatctttctggatttcaagtttcttaactgtaaaaatgcaaatgattaactaccatcttctatcatttacgtgtgcagataaaagaaaagaaaaataacttgtatgtttttaggcacataataggggttttcagtatatgagtttccttttccattatcaaaagaaacaccatcagaattaaaataaaatatggaagatcaaagaaacccagagggaaaacaagaaaacaaatagttatcctttttagacaacacatctagagtacttgcgtgatatttgagagcagtatcttttagctattaacacaaattggtagggacagaatttagttccagaaatagcagatgatcctttgagacattgtactgttcaaagttatccagagaaataggaccaacaggatctatccatctatctatctatctatctatctatctatctatctatctatctatctatctatctagacaaagatttactgtaaggcattagctcatataattaatggagcctaagaagtccaaagatctgcagttggtaagctggaggtgcaggacagcctatgtgtagttccattgtaaatccaaaggcctgagaaccaaggaagttgatgctgtaaattctaatccaaaggttggcagactcgaagtcaagagccaacatttcagtccaagtctggaggcctggaaaaaaacagtgttccagctcaagaggtcaggcaggagaaattcccctttactcggcctttttgttcaattcaggtccgcaatttattgaataaggccaataacagtagggtggatgatttgctttactcagtctgccattcaaatattaatctcatccaaaaacaccttcacagatacatcccaaataatgtttagccaaatgtgtgggcatctcacggactagttaagttgaacttataaaattaaacacaacaggaatgattcattgcaagggctggtcttaactgcttttgcactaaagccagaagaaaatgctgggaactccctgcaaactgtaagccaacagcttcttgaatgttttttttctgagtattttaatacatagtataagacagtggataattaagtactaaattatttagaaaagactaagtatcttcatcttctgaatccatgagctataccattacactgataatttgattttgtactatcttgcattgttcattaactcttccagactaggttatatttttgcataaagtcatatttctctctatatagctcttagcttaatgcaatccttttaaagtaataaatgaagtaaagtagataaagcaaaacctgtgtcaatggaaaccaacacaaatgtatttaataatatgaagaaagctggtctggcttttataataattccatgatcctttcaaagaaaatccaaatgagaagcatattctagaagatatatgagtcttaagaagctggtttattcccaaaatatccttgataatataatttacaaaaaataccaattatccagtggacttggtaaaatagcagcctatgaccaagacagttttacatgctcaacctacatttcacatatgcagttacaaaatattgctgataaaaaggaaatgaggcacataaaactgcttagggaaaactgcaaaatatacttgcaatttcagattgaaataagaggactatcttcttgtcagattcccttactacatattaattattcattatgaatgtcagtttagtctataataacaacattagaaaaaatacttatagtttattttatcttttagaagaaaaatattctatgactataaaataattcatgtgcaacattacagtctagtattttaacatcaatacccagcatgtaacaaacagtttaagtataccagggaccatgatagatgcttttcagctgaagaataggactgagattacttctggctgggaattcaagaaagctgtcatggaagaggcaggagttatgaaggcctctgacagactagtaaaattcaggcatgaagaaatggctgggaagggcgttccatgagttggaagcaggttgagcaaaatgtagagagatgggaaagaggcacatttgtggaataaagaagagttcagtttgaataaaatataatattcatggaggaaatgctaagaaatggaggagtcatacacaaagactttgggctttgaaatcagaaaaccctaagctgaaattctggtatatttaacttcagtttcatcttctgtaaaacagtgcctttcacatagtgttacaaagacaaatgaggcatgtacagatacgtgtgtgtgtgtgtgtatgtgtatgtctgtgtgtgaatacattgcctgacacatagtaagtgctcaataaaattatctattactattattatcagatatatgaatataatcataatagcaaataaaactagataggtggcttgatgccttattatggaaaatcctaagtgcatcacttgcatcactaagtaatcatcaaatataagtatttaataaatcctaatctaacaattcatgaagcacaatttttacgttttggtattaagtcaagagttgacaaattttttctgtaaagggccagatggtaaatattgtaagctctgtaaggctacatgatctttgttgtaactactctactctctttgggtagcgagaaggcagccacaggaaatatataagcaaatgggtgtgtccgtattccaagaaaattttacttacaaaaacaagcagtagacaagattaagtttgttggtgataacttgtagatccctgtcttaagtacttcctatggaaatgttttcccttttatggacagacctagaagaatgttatattatacattttcatttccatattcatattatagatgaacattctcactgtgtaattaaaaactaaggttttcaatataaagctagaaatttgtcatttgtacaaaaaatggcattatatctaacaccagggcagtcctttgtacacagcaactgttcaatatatgctcattaaatagataaataaataagaccaatgaaatctttacattttaaagtaactttgttgtagtgattgtacatgactaccacttctgggagaaacagtacagaaatcataagtaaaaaagcccaagtatcctgtttcagtattttcagtgagaaagtactcactatgtaccacttgaggaagataatatttaacagtaatttaagagaattagttaataatccaaataattaacacattttactttctctagtgaaggtttgttaaaaagtaacaattctcttaaatataccgggtttgaacttccattactatcaccaacaatagtgttaaatattcaagtcttaattagccagcaactttaccagatgaaatgtgtggtagacagcctctaggatggtcccaattgagccccacctcatggtattcacacttttgtgaaattttgtcccctagggtgtgagttgaactcgttgaattgcttctaacaaagaagagatgaggccgggcacagtggctcacgcctgtaatcctagcactttgggaggccaaggtgggcggatcacaaggtcaggagatcgagaccatcctggctaacatggtgaaaccccgtctctactaaaaatacaaaaaattagccaggcgtggtggtgggtgcctgtagtcccagctactccggaggctgagccaggagaatggtgtgaacccgggaagcagagcttggagtgagccgagattgcaccactgcactccagcctgggtgacagagcgagagtccgtctcaaataaaaagaataaaaaagaaaaaaaaagaagagatgagttgtacttctgggaataggttataaaaaaagactgtggcttccgtcttgtgtgtgtcctccttctcagatctcttgcactgaggaaagcaagtaaccacattgtgaacaaccttatgcaaaggcctacgtggcatggtaaggagctgaggccctcatttcaacagcccaccagaaactgaaccttgttaacagccacgagttagcttggaagcaaatccttcagccccagtcaagccttgaaaagactgcagttctagccaacagcttgcttacagcctcccgggaaatcttgagtcagaggcatcccgctaagtccctcctagtttcctgaccctgtgagataattaatgtttgttattttcggccacaaatagcaatagataactaatatagtaaatgtttggttaacgtttataacatggccaacatgtttgtgctacaatggtgcttagactttcagccttgttttgaaggagctgactacttaatggaaaacatagaagggcaaatataattacaaaattgtgttacttatgctacaaattcagcaatatgggaacacagaagaatgagccactaaccaaatgagggggccagagcagaaagttaggttataggcagaaagagaaagtgaagaaaaaaaatgtaatagccttgaggaatgagtgccatcaagaactcaaagagggagaagcattccaggcaaagaaaacagaatatgcaacagggcagaagcatgaacgagcattatgcctttgggaagctataaatagttcagcttggctgaagcacaggatatgtgtggaaaagtgaatggagatgatgttggcaagataaagtattcagatgaaagatggaaaggtgtataaaaagaaaacaaaattgcctttgtaaaagattaaatttttctatttaggaaaaaaagtcagccacattgcatttctaaaattactttccttgaggctatgatcaaatgctactttcatctataaaaagaacagaccacaaggctatagtcactttaaaattctctgcatgcaagaggccacatctgtgtgctaaagagtagaatgattgactagcagcttcaagccaataagaactttggtcttatctacaccagagaagttctagcaaagagtcaaaaactcgaagagttagaggacatctaaaagtccaagatctcaattcaaacataaaaagcagtgcaatgaacagatggttgggagagtgtgctctctcccacctttcctttacttttgtttcctcctctttctcaacccatggcagggagatggtcttttagcataataattcaccagaggtatgctgtaattggtgagcaatattagtaggagaaatgtttccttgtcttataaattctctactctgaagaatctcaaggatttatgagaaatgcaggagtcttgtagaattttaccttcctcctcccaggatgatgccaagaatgacaattccctggccttggctagcaagactgaactagaatcctggagaactgcacagttaagaaaatgaaagagaaagggaggccatagaagatgggttccctcccaatgcttacttttatggactaaatgttaagcaatgaagaaagtaaaaaagaaagaaaatattttgcatcacatcagtaatccgtggattctctgttttactaatgcacttgtgcttcaattcttattttggctcttcaggctctcctggttttgagtcccattttaggttgtatgctttcccttttgtcttaacaacctattcttttctccggttgtactcttagtggtccctgtattcatcttctatatctttctattcattccaaaattatgtaaacacccaacctgaccaagacacaccctagcactagcccaccaggccagaacccctactaagtagccactgactctctatgaaaggaagttagaaaatgaacctgctgagagtaaagggggaaaaaggtggataggaggcaggactaacttgcagctgccactcagatggacagagcagcatgtggagacccacatcatgaacttttgctccaagaactaccataggaacataccaggaaagcagagaaaaccacagaccctttgaaggagtagattgccactgcaggctctgtgagtcagcttgctttctcagcagggaggtttgtagcctggggcaagttcttagtcctgctcataggctgcctggaaataaacggtgctgttggcagggcacagtgggaatgagactggccttttgggctgtgggctgtgtgggagttgggtgaggtctgtggctgctggctttccaccactttcctggtgacctgtgcgactcagcagaggcagccataatccccctgggatataactccattggcctgggaactgcaaccccacccccaacagtagccacagcaaaccccacccaaggagagtctgagctcagacacacctaaccctgtccccacttgatggttattgtctgctggccctggtagctgaagactaaggacataatctcttgggaactctatggccccacccacggcctgatccttcctatactactgcagctgatgtgctattgaaagcaccacctcctggcttgaggacaaccaaaacaaaaccagcgcacttaacaaaaatacaaccaaggaccctcagagagtccacttcactctcctgatacctccaccagagcaggtgctggtatggtatccacagctgagagacctgaagatgggtcaaatcacagaactctttgcagacactcccagtaccagcctggagcccagtagctccactgggaggctagattcagaagaaaaataacagtcacttcagctctcaggaagccccatccctaggggaaagggaagagcaccatatcaagagagcaccccattagacaaagaatcttaacagaagcccttgagtcctagatcttctctctgaaatagtctacccaaataagaaggaaccagaaaaaaacaattctggtaatatgacaaaacaaggttctttaacacctccaaaagaacatactggcttaccagcaatgggtcaagatcaacaggaaacctctgaattgccagaaaaagaattcagaaggtcgactactgagccaatcaaggaggcaccagaggaaggttaagtgcaacttaaagaaatcaaaaaagatgatacaggatatgaatggaaaaatctccagtgaaatagatagcataaaaaaaatcacaacttctggaaatgaaggacacacttagagaattacaaaatgcactgggaagtctcacaatagaatcaaacaagtagaagaaaaaaacttcagagcttgaaatcaaggctttcaaattaacccaatctgataaagacaaagaaaattttttttttaaaatgaacaaggcctccaagaaaatttgggattatattaaatgatcaaacctaaaactaattgatgttcccgagggagaatagaaatctaaaagtttggaaaacatatttgagggaataatagagaaaaactttcccagccttgctagagatctagacatccaaatacaaaaagctcaaaaaacacctgggaaattcatcacaaaaagatcatcgcctaggcacctgatagtcatcaggttatctaaagtcaagatgaagagctgtgaggcaaaagcatcagataacctataaaggaaaacttatcagattaacagcagatttctcagcagaaatcctacaagctagaagggattggggttctctttagcctccttaaataaaacaattatcagccaagaattttgtgtccagtgaaactaagctgcataaatgaaaaaaagatggtgtttttcagaaaaataaacgctgaatttgccactaccaagccatcactaaaagaatggctaaaaggagctctaaatttttttttaacctctaaatcttgaaacaaatcctcgaaatacaccaaaatagaatctccttaaagcacaaatctcacaggacctataaaacaacaacactatgaaaaaaaaaccaaggtattcaggcaacaaatagcatgataaacagaacagaacttcatgtcttaatattaacattgaatgtaaatggcctaaatgatccacttaaaagacacagaatggtagaatggatgagaattcactagccaagtatctgctgtcttcaagagagtcacccaacacataaggactcacataaacgtaaggtaaaggggtgaaaaaagatacttcatgcaaatagacaccaaaagcaagcaggagtagctgttcttatattagacaaaacaaactttaaagcagcagcagttaaaaaagacaaagaaggacatacataatgataaaatgactagtccaataggaaaacatcacaaacctaaatatacatgcacctaacactggaagtcccaaatttataaaacaatttctactagacctaagaaatgagatggacagcaacacaataatagtcggggacttcaatattccacagacagcagtcaggtcttcaagacagaaagtcaacaaagaactataccctagaacaaatggactaaacggatatttacagaacagatatttacagaatattctacccaacaactgcagaatatacattctactcatcagcacaggggacattctccaagatagaccatatgataggccataaaacaagtctcaacaaatttaagaaactcaaaatcatagcaagtactctctcagagcacagtggaataaaattggaactcaactccaaaagaaaccctgaaaaccatgcaaatacatagaaactgaataacctactcctgaatgattactgcataaacaatgaaatcaatatgaaaattaaaaaatttacactgaacaataatagtgacacaacctatcaaaacctctgggatacagcaaaggtggtgctaagagaaaagttcatagcatcaaatgtctacttcaaaacatctgagagcacaaatagacaatctaaagtcatatctcaagaagatagagagacaagaaccaaacccaaatctagaagaaaaaaagaaataaccaagatcggagcagaactaaatgaaattgaaaaaaaaaaaatacaaaagataaacagaaagctggttctttgaaaagataaataaaattgatagaccattagcgagactaactaagaaaagaagagagaagatccaaataagtgcaattagaaatgaaacaggagatattacaaccaatcccacagaaatacaaaagaccatttaaggttactatgaacacttttatgtgcataaactagaaaacctagaggagatggataaattcctggaaatatataaccctcctagattaaaccaggaagaaatagaaactctgaacagaccaacaacaagcagcaagattgaaatggtaattaaaaagttaccgagaaaaaaaggccaggaccagatagatacacagctaaattctctcagacattcaaagaagaattggtaccaatcctgttgatatctattccaaaagatatagaaaaagagaatcccccctaaattattctatgaagccagtatcaccataataccaaaaccaggaaaggacataacataaaaagaaaactacagaccaatatccctgattaacatagatacaaaaatcctaaacaaaatattacttaactgaatcctacagcatatcaaaaagataatccaccatgatcaactgggtttcatacaaggaatgcagggatggtttaacattcacaaatcaataaatgtgatacaccacataaacagaattaaaaacaaaaattacatgatcatctgaatagatgcagaaaaagcatttgatgaaatccagcatccctttatgattaaaaccctaagtaaaattagcataaaggtcattcgttaatgtaataaaagcatctatgacaaacccacagccgacattatactgaatggggaaaatttgaaagcattccccctgagaactggaacaagacaaggatgcccactttcaccacttctattaaacatagtactggaagtcctagccagagaaatcagataaaagaaagaaataaaggccatccaaatcaataaagaggaagttaaactgtcactgtttgctgatgacatgatcacatacctaggaaaccctaaaggcttatacaaaaagttcctagaactggtaaatgaattcagcaaagtttcaggatacaaaattaacatacacaaatcagtagccttgctatacaccaacagttttcaagctgagaatcaaatcaagaactcaaccccttttacaatagctacaaaaaaaaaaattaggaatatactcaaccaaagaggtgaaagcctgctacaaggaaaactacaaaacattgctgaaagaaatcatagattgacataaacaaatagaaacacatcccaatctcatgaatgagcagaatcaatattgtgaaaaatgaccatactgccaaaagcaatctacaaattaaatgcaattcccatcaaattaccaccatcattcttcacagaactagaaaaaacaatcctaaaattcatacggaccccaaaaagagcccacataaccaaaacaagactaagcaaaaagaacaaatccagaggcattacattactgaacttcaaactatactataaggccacagttgccaaaacagcatggtactggtataataacatatggaccaatggaactgaatagagaatccagaacccagaacccataaataaagccaaatgtttactgtcaaccagtctttgacaaagcaaacaaaaatataaagtgcataaaggacaccctatttaacaaatggtgctgggataattggcaagccacgtaaaagaatgaaactggatcctcatctctccccttaaacaaaaatcaactcaagatggattaaagacttaattctaagacctgaaaccataacaattctaggagataacattggaaaaacctttctagacattggcttaagcaaagacttcatgaccaagaacccaaaaacaaatgcaacaaaaacagagataaatagatgggacttaattaaactaaaaagcttctgcacagcaaaagaaataatcagcagagtaaacagacaacccacagagtgggagaaaatcttcacaatctacacatccaacaaaagctacaaggaactcaaacatatcagcaagaaaaaaacagtctcatcaaaaattgagttaaggacatgaatagacagttaccaaaagaagatatacaaatggccaacaaacatataaaaaaatgctcaacatcactaatgatcagggaaatgcaaatcaaaaccaaaatgagataccaccttactcctgcaagaatggccataataacaaaaaaaaaaaatggatgttaacatggatgtggtgaaaagggaacacttttacattgttgatgggaatgtaaactaataaaaccaccactgaaaacagtgtggagattcctcaaagaagtaaaagtagatctaccatttgatccaacaatcccactcctgggtacctacccagaggaaaataagtcattatacaaaaaaagatacttgcacacacatgtttatagcagcacaattcacaattgcaaaaatatagaaccagcccaaatgcccatcaatcaacgagtggataaagaaaatgtggtggatatatacatgtatatatatatatatatacacatacacacaccatggaatactacttagccataaaaaggaacaaaataatggcatttgcagcaacctggatagaactggtgaccattattctaagggaagtaactcaggaatggaaaaccaaacatatgttctcactcataagtgggagctatgctatgaggatgcaaaggcataagaatgatacaatggactttggagactcaggggaaagagtggaagggcagtgagggataaaagtctacacattgggtacagtgtacactgttcaggtgatgagtacaccaaaatctcagaaatcaccactaaagaacttattcatgtaaccaaatacgaactgtttcctaaaaacctattaaaattaaaaaaaaagaagaagaaaatgaacttgctaaatccctgaataaaatatcacagtagttggaggtgaaatgacattcattcttccacatgacagtgtaaattccagtagtattccttcacactcatttaaaaatgagtctaatctcatcagatgatgctatagtccatacttcctcatagctataatttatgaacttctttttactctcttttatttatcagagaattagcatgtatctcccaatcttgctttccacctcaagcctatcatcattttgggaactgtcagtttcctcgtacattttcaatcaatctcttgagcctgagtgttttgatttctacttacgtaatctttgctttaattctattcagattaccatgtctaaggctaacccatgtatttcattatgaacagcaactacttcatatagatatttaatctctagtaactcattctgtggatacaatgtccaatcacttcctctctcttccacactacatctattgtttaatcccatctctatccttttatccatctagtttcatccaacctatcagtccctttccatcttcacatttacttatttagtttagacacaatggcccatcacttaacaactctcttgccagtaactacattcactcttgttattttaccacatacactgagcaaaaccctattcctatttgcagttgacactttaatgtaccacccagattcaacttcagatataaaacatttattctcctagctgtatgatgtgttgctggcagacagtcttcagctgtcagctttcttttggaattgcctcaactgaagagaatggactgacccaaggccatgcccccttccaggtgcaagctgctttcaatgtcaggtcaacacaagtgtataatagtcctgtcctatcgccaacttggaatgactttgaagagtcatcccagtttcagaattccctagggagcctttggatggctatattgagacttcatcacagcctgatctctccagctgccatttctggcttccctttaacaggtgttgcctccgaaatcactcaataaatctcctgtatgctaacctacatctcaaagtcagctttctggtgaatccatcttggattgaactcagttgttctcagtggccccttctgcatctttttaaccaattaggtactaatgactgagacagaaaaatcatacaactgctagaaattaatgttatcaaatgatttgatattctctgatatggtttgtatacttgtctcctccaaatctcatgttgaaatgtgttccccactgttggagatgggcatactgggaggtgtttgcattatgggaatggatccctcatgaatggcctggtgccctccctgtggaggtcatgagttaccatgagatctggctgttaaaaagagtctaggatctacctcttctctcttgctcactctctcatcatgtgatatgccttctccccctttaccttccaccatgagtaaaggttcctgaggcctcattgtaagctgagcagatgttcatgccatgcttgaacatcctgcagaactgcaagccaaacaaacctcctttctttataaattactcagtctcaggtattcctttacagcaatacaaaatggaataacacatgctttcacaaataattcacacggtgaaaaaaataccctaatagaaaactggactaaaaactaccaacaggcacttcacaaaagaaaagtacaaataaatgtataagccttttgcctcagcttctgctcaagcctttgtataggaatgcatggatggaatacagtcttctggttttgttttgattaatatgtgaagacaagatattcacaagcttaaacattcaaatgcggcagccaagatggccgaataggaacagatccggtctacagctcccagcatgagtgacgcagaagacgggtgatttctgcatttccatctgaggtaccgggttcatctcactagggagtgccagacagtgggtgcaggacagtgggtgcagcacaccgtgcgcgagccgaagcagggcgaggcattgcctcacttgggaagtgcaagggggcagggagttccctttcctagtcaaagaaaggggtgacagatggcacctggaaaatcaggtcactcccaccctaatactgcgcttttccgacaggcttaaaaaacggtgcaccaggagattatatcctgtgcatggctcggagggtcctacgcccacggagtctcactgattgctagcacagcagtctgagatcaaactgcaaggtggcagcgaggcttggggaggggcgcccgccattgcccaggcttgcttaggtaaacaaagcagctgggaagctcgaactgggtggagcccaccacagctcaaggaggcctgcctgcctctgtaggctccacctctgggggcagggcacagacgacaaaaagacagcagtaacctctgcagacttaaatgtccctgtctgacagctttgaagagagcagtggttctcccagcacgcagctgcagatctgagaagggacagactgcctccccaagtgggtccctgacccctgacccccaagcagcctaattgggaggcaccccccagtaggggcagactgatacctcacatggccgggtactcctctgagacaaaacttccagaggaacgatcagacagcagcattcgcggttgatgaaaatccactgttctgcagtcactgctgctgatacccaggcaaacagggtctggagtggacctctagcaaactccaacagacctgcagctgagggtcctgtctgttagagggaaaactaacaaacagaaaggacatccacaccaaaaacccatctgtacatcaccatcatcaaaaaccaaaagtagataaaactacaaagatggggaaaaaacagagcagaaaaactggaaaccctaaaaagcagagcacctctcctcctccaaaggaatgcagttcctcaccagcaacagaacaaagctggacggagaatgactttgacgagttgagagaagaaggcttcagacgatcaaactactccaagctacaggaggaaattcaaagcaaaggcaaagaagttaaaaactttgaaaaaaatttagatgaatgtataactagaataaccaatacagagaagtgcttaaaggagttgatggagctgaaagccaaggctcgagaactacgtgaagaatgcagaagcctcaggagccgatgcgatcaactggaacaaagggtatcagtgatggaagatgaaatgaatgaaatgaagccagaagggaagtttagagaaaaaagaataaaaataaatgaacaaagcctccaagaaatatgggactatgtgaaaagaccaaatctacgtctgattggtgtacctgaaagtgacggggagaatggaaccaagttggaaaacactatgcaggatattatgtaggagaacttccccaatctagcaaggcaggccaacattcagattcaggaaatacagagaacaccacaaagatactcctcgagaagagcaactccaagacacataattgtcagattcaccaaagttgaaatgaaggaaaaagtgttaagggcagccagagagaaaggtcgggttacccacaaagggaagcccatcagactaacagctgaactctctgcagaaactctacaagccagaagagagtgggggccaatattcaacattcttaaagaaaagaattttcaacccagaatttcatatccagccaaactaagcttcataagtgaaggagaaataacataccttacagacaagcaaatgctgagagattttgtcaccaccaggcctgccctaaaagagctcctgaaggaagcactaaacatggaaaggaacaaccagtaccagccactgcaaaatcacgccaaattgtaaagaccatcgaggctaggaagaaactgcatcaactaacgagcaaaataaccagctaacatcataatgacaggatcaaattcaaacataacagtattaactttaaatgtaaatggactaaatgctccaattaaaagacacagactggcaaattggataaagagtcaagacccatcagtgtgctgtattcaggaaacccatctcacgtgcagagacacacataggctcaaaataaaaggatggaggaagatctaccaagcaaatggaaaacaaaaaaaggaaggggttgcaatcctagtctctgataaaacagactttaaaccaacaaagatcaaaagagacaaagcaggccattatataatggtaaagggatcaattcaacaagaagagctaactatcctaaatatatatgcacccaatacaggagcacccagattcataaagcaagtcctaagtgacctacaaagagacttagactcccacacaataataatgggagactataacaccccactgtcaacattagacagatcaacgagacagaaagttaacaagaatacccaggaattgaacccagctctgcaccaagcagacctaatagacatctacagaactctccaccccaaatcaatatacatttttttcagcatcagaccacacctattccaaaattgaccacatagttggaagtaaagctctcctcagcaaatgtaaaaaaacagaaattataacaaactgtctctcagaccacagtgcaatcaaactagaactcaggattaagaaactcactcaaaaccactcaactacatggaaactgaacaaactgctcctgaatgactactgggtacataacgaaatgaagacagaaataaagaaggtctttgaaaccaacgaaaacaaagacacaacataccagaatctctgggacacattcaaagcagtgtgtagagggaaatttatagcactaaatgctcacgagagaaagcaggaaagatccaaaattgacaccctaacatcacaattaaaagaactagaaaagcaagagcaaacacattcaaaagctagcagaaggcaagaaataactaaaatcagagcagaactgaaggaaatagagacacaaaaaacccttcaaaaaattaataaatccaggagctggttttttgaaaggatcaacaaaattgatagaccgctagcaagactaataaagaagaaaagagagaagaatcaaatagatgcaataaaaaatgataaaggggatatcaccaccgatcccacagaaatacaaactaacatcagagaatactacaaacacctctatgcaaataaactagaaaatctagaagaaatggataaattccttgacacatacaccctcccaagactaaaccaggaagaagttgaatctatgaatagaccaataacaggagctgaaattgtggcaataatcaatagcttaccaaccaaaaagagtccaggaccagatggattcacagtcgaattctaccagaggtacaaggaggaactggtaccattccttctgaaactattccaatcaatagaaaaagagggaatccttcctaactcattttatgaggccagaatcatcctgataccaaagcctggcagagacacaaccaaaaaagagaattttagaccaatatccttgatgaacactgatgcaaaaatcctcaattaaatattggcaaacctaatccagcagcacatcaaaaatcttatccaccatgatcaagtgggcttcatccctgggatgcaaggctggttcaatatacacaaatcaataaatgtaatccagcatataaacagaaccaaagacaaaaaccaggtgattatctcaatagatgcagaaaaggcctttgacaaaattcaacaatgcttcattctaaaaactctcaataaattaggtattgatgggttgtatcgcaaaataataagagctaactatgacaaacccacagccaataccatactgaatgggcaaaaactggaagcattcccttgaaaactggcacaagacagggatgccctttctcaccactcctattcaacatagtgttggaagttctggccagggcaattaggcaggagaaggaaataaagggtattcgattaggaaaagaggaagtcaaattgtccctgttcgcagatgacatgattgtatatctagaaaaccccactgtctcagcccaaaatctccttaagctgataagcaacttcagcaaagtctcaggaaacaaaatcaatgtacaaaaatcacaagcattcttatacaccaataacagacaaacagagagccaaatcatgagtgaactcccattcacaattgcttcaaagagaataaaatacctaggaatccaacttataagggacatgaaggacctcttcaaggagaactacaaaccactgctcaatgaaataaaagaggatacaaagaaatggaagaacattccatgctcatgggtaggaagaatcaatatcgtgaaaatggcatactgcccaaggtaatttatagattcaatgccatccccatcaagctaccaatgactttcttcacataattggaaaaaactactttaaagttcatatggaagcaaaaaagagcccacatcgccaagtcaatcctaagccaaaagaacaaagctggaggcatcacggtacctgacttcaaactacactacaaggctacagtaaccaaaacagcatggtactggtaccaaaacagagatatagatcaatggaacagaacagagccctcagaaataatgctgcatatctacaactatctgatctttgacaaacctgagaaaaacaagcaatggggaaaggattccctatttaataaatggtgctgggaaaactggctagccatatgtagaaagctgaaactggatctcttccttacaccttatacaaaaattaattcaagatggattaaagacttaaacattaaacctaaaaccataaaaaccctagaagaaaatctaggcattaccattcaggacataggcatgggcaaggacttcatgtctaaaacagcaaaagcaatggcaacgaaagccaaaattgacaaatgggatctaattaaactaaagagcttctgcacagcaaaagaaactaccatcagagtgaacaggcaacctaaaaaatggaagaaaattttcgcaacctactcgtctgacaaagggctaatatccagaatctacaatgaactcaaacaaatttacaagaacaaaacaaacaaccccatcaaaaagtgggcaaaggatatgaacagacacttctcaaaagaacacatttatgcagccaaaaaacacatgaaaaaatgctcatcatcactggccatcaaagaaatgcaaatcaaaaccacaatgagataccatctcacaccagttagaatggcaatcattaaaaagtcaggaaacaacaggtgctggagaggatgtggagaaataggaacacttttacactgttggtgggactgcaaactagttcaaccattgtggaagtcagtgtggcgattcctcagggatctagaactagaaataccatttgacccagccatcccattactgggtatatacccacaggactataaatcatgctgctataaagacacatgcacacgtatgtttattgcagcactattcacaatagcaaagacttggaaccaacccaaatgtccaacaatgacagactggattaagaaaatgtggcacatatacaccatggaatactatgcagacataaaaaaggatgagttcatgtcctttgtagggacatggatgaaattggaaatcatcattctcagtaaactatcgcaaggacaaaaaaccaaacaccacatgttctcactcataggtgggaactgaacaatgagaacacatggacacaggaaggggaacatcacactctggggactgttgtggggtggggggaggggggagggatagcattgggagatatacctaatgccaaatgacgagttggtgggtgcagcacaccagcatggcacatgtatacatatgtaactaatctgcacattgtgcacacgtaccctaaaacttaaagtataataataataaaatttaaaaaaaaattcaaatgtttcctcttttacctcattatgatttctttcaaggcagacacaatgtgtctaatttgtctttatatcaccattacacattacagtagaattcactttattaggagtcaggactcaatttttgaacagtcagagtattacggacaaaacaatatttcatgtatttttaaacaaagtatttcacatcatttacttaatatctatatttgttaaatactgatgagaacaaaatttcaagtatctagaatttagcaaagaagttaaatgtccaactaaaataagtttaaatttaaatgattaaattgtttgttgtatttcagattctatccattttactttaatagaaaaatatcattcataaaaaagtttggctggccacagtgactgacaccaaaaatcaaagcattttgggagactgaggtaggaggattgcttgaggccaggagttccagacaagcctgggcaacataggagacccccgtatcttcaaaaataaacaaattagtgggatttggtggtacaggcctacagtcccaacttctcaggagactgaggcaggagaatcacttgagctcaggagttttaggcggccgtgagttatgattatcccactgcactccagcctaggtaacagagactctgtctctaataataataataataataataataaagttttcatgaaaaaaagaaatattaataaaatttcctaaattggagacatgcactcattatccacatatatcaacattggtcttattttcattatggtatactgtatgagctatggaaattattaagtatcaagcattaaattacctgccaattcttgttcattatacaatcactggtctcagaagaacataatcattacaaagacaacttcaaaagtaggagtgactatctttaatgctttaatgacattgtagagcatcacatcatgatttgttatggagtttagttttcctcttaattactatcacacttcaatctaaatgaatttagatttcatgtaacattttgactttttggaaggtcatggtttcttcattagtaggcaaaactcctacttaggaaagctatcaattcctcaattctcctattatttttatacatgtggttatagtttaatagattacttcttttatatgcccactgcagcatgtgaattttatgctaacaagagtgtgcacttaggcacacatgcaatatagctatgatatgtctatcatataaattaaatatgtgccaagtatttcatggagctaatacattttactcaaaatgtcagtaaattctagaaaaactggatggaaattgccaattataaaatgagagttttgattgaagtccacattagccaggaacccatactttggttacctgatattttggcataaatgtgaccacatattcatcttactatattattaccatatgaacatatatttcctttgaaatgctatcatgttcttcaagttatatgaatactaatgataagagatcttacatgttataaaaggaatacattgtatggaattacaatttatttagacatactttgggaaaagtttgattgcatttcatatgcgttcataaatcaaattgaactgtttcaggattttcaggaagcaaaatgacaaccaaaagtataatttaatcctaaagcatctttcctctttttttcttaatactcacagctaaacttaactgaaagtaaagttttcattctaagctttccaggttcattaaattgttcctatatcctcacaaaatcatgatttttgtttaaaatttaaggacatttttgttgttgttaacaaaatattgcttaaatacttgttatacatcatatatatttatgagtccaaaagtacctagttattataactttggaagcccagagtcctgtttaaaaaaaaaattagatgtcacaaaaggcctctgagctcttgatgaatgtgttataagttttgtgtacatcttaagggacctctttcacaagcaaccagaagtccttttgtaattacttatgctcaacatctatttctaatttgcagagctatgatgaggaacatccccagttcacacaccacttggcaactctgaactcactgatcaatgtgtcagtagacaggtttgtaatgagtagacataaaacaacatatcacatatgcgtgcacacacacacacacacacacatacacacgctctttaaagtgctttgaagtgtttactctttggtctgctactcatggaccaaatattattaaaaaatatgttgctgctactcttccaaatatacttaaaactctgacatgtaatgcaggttttcctataatctgtgaaatccctgctgcctttcaaaaaaatcattctaataaaaacagagataaatttacccagaagagtaaactagcatgaaatgccctgtttttgctgttgtcacaattcattgttaagttatttagtggtcccttattaaatgcccttagaattcgtagtgcaaaacgtttttacatagaatgggagtcctatatgacatattttaatttttacatggaatgacattcctatataacaaattttaatcctgttaatttaactaattacataaacctaaccaccacagtaaattatagtctgacctaaaagaaaatatggcatgagctgagacaaaatgtatccagttctcagaacatatctatgtctcctctaatttgtaggtcttttttcctttgtatgacactccacttaaatatcctgccggacctagctcaaatgctattttttctgcagcgtcttctctggctcggtcagtcagtaactgatgtttcttccatcatttcttcatataagatcaggctcattacattataattatttaggtatccctctgtctccctacagagcgtgagctccttgaaggcaagaacctttttacattttctttacactctcagacctaagtatagtactggatgttaaattaataaatacatgcaagatactatatcaactaaattagatatttcaaaatagttttgttgttgtaacaaaaattggatgttttgtagatgtttataattctgttttcattttaactaatacatagagttccactttattaaaacatatcctttgattaccttatagctagacacagaaggaggaaaataggagggtaaaggattttaaaagcatttggggatttttaaaaaaggcttccagagactaataaatcactgaacagtagtaacaatgctgtcatcaccaatctctatacaccgagtttcatgcagcatttaagaaagcctatgagttaaactgcgcttaaaataagatatatatttgcttttaaccatgtcaaattgtgcatgaaaagaaagtccttgaaggcactataccaaatgttataaagctcacctctggctggagagattatggattaattttttaaaatatttttcctatttccctaatattcttctaagagcatgtcttactttgatttacttatatttgtttcaaatattggctattattttttaaagcattacagatacttttaaaatctcttttatatcctgtcacaaacctatttccatgttgccttcatgagttaatcaccatcctgaagttggtatgtattatccgtctgtgcctttatacttttactatttatgtatatagtcattagacatattaattatgtcacagacatattgtgttttaaatttacattaatatcatatgacaattctgactcctttttttcatttaacactttcaatatagatccacatggatgtttataatcctactgttttattttaactaatacatagtgttccattttattaaaatttatcttttgattattttatgaatagacattttgttttttcgtaatttttcattcttacaaacaatattgcagtgaatatccgtgagagacttaaagttttcttttcaagagccatacctagtagtacaattaattgatagatagaagagtatgtgcatttcaaacttttaaaaatattgatgaattgtcatccaatgtggagtaccaatttatagtcctatgagaattcctgtttttctatatcctttacaatacttgatattgtcagaactcttgttttctgtctttctagtagatggaaatacaactggcacctcattggggccttaatttaaatgtccctgttacctgtgttaactatgtttattggttattcaaaattcattttcagggaattgtctttgccaattgtttccattctttgtttgctttttgttgttgtcttttccttactttgtagtgcttataccttctcagtatgtgcattataaacatctttcccagtttgtggcattttaaaagtattttgtgacatgtcatgctaagcatgagctttaatgtaatcaatcctaccaatcttcttaatgatgtgtactttttgtcttgtgtaagaaatccttccctaaactaagatgtccatgtggattactttttttaatttgttaaattgaggaattatattgaaagatttttggtggctgaaatatccttagaagagtgagttaagttctacttagtatgatctacgttttaatgcattattgaattcaatgtggtaatattttgcttagacttagtacatctgttttcacgcagagattaatccatatatactgttcttgtactctccttgtccattttcgtatgtaagtcatgaaagtacaaagttgggtagtttacttctttgtacactctcttcaacagtttgtatagcattggtattatctgttcattaaggtttgataaaactatcttatcaaaccattttgcaattctattctgttaaaatttactgagttatgactagtaattagtacttttcccagaaaattgtacattttatgtcttaaaatataaagaagaaattaataaaatcaagtatatcagtggttacattaaatataagtagaattatccccaataaaaaccaaacatggggctaaaaagttagacacatttttttaaaaaagttctatcctgctcattagaaatacacctaaaataaaataaagctggaaataaatagaaaagaagtgaaaagcaaaggcaaacaaaataacagaaatgaaaatattaaaatatataaggtcatattttagaattaaaattgttaatagaaataaagggaatactatataatgacaaacatgaagaaatttataaagcaattgtggtatcattctaggagtaaaatcctggaaactattttatctgaaacagaaaccagactcaaatgccttccattgccatttgttcaacattgtcttgaaggttctactaaatatatcaaagtgggaaattaaataattactataaatattggggaaaagagtgaaaatatttatttttgttgattacatgattatatatccaaaagcctctataaaactcaaaagccggctgggtggggtggctcatgcctgtaatccaagcacactggtaggccgaggtgggcagataattttaggtcaggagtttgagatcagcctggccaacatggtgaaatgccatctgtactaaaaatacaaaaaaaaaaaattagctaggcatggtggcacacacctgtaatcccagctacttgggaggctgaggcaggagaatcacttgaacccaggaaacagaggtttgcagtgagccgagatcacaccactgcactccagcctgggtgacagagtcagactctgtttcaaaaaaaaaagaaaaaaaaaaaacctcaaaagcttaagttttaaagtaaaatatattaaaattaaaataattttgtaaggtagctgaatacaactaatatattaaaaattcaatacttattgtgcattctaacaataaacacctataaatggaaatgggaaaaaaaattctttcaacagagtgataaaaactatcaaatagaaactactaagaaattcatagaaattgtatcatttaaaaaactatatattttattaaatgtcatgtaaaatctgaataaatctaggacaatataaaatattaaaagggcaattccccaaaagtaatataaacataaaattaaattccatttttttataattccatttttttggatgtagttcttttgaaattggatgaaattatcttaaaactcatatggtaaaataaatgaccaaaataacaaagaaagtatgaaaaataatagttaaaaaaagaatgcctgtccaaatagcagaaaagattatacagctactgtaattacattaatcagtcatataaaaaatgaagagcaataaaaatatgtccaaatatatagaattttataaataacaaagagtgtatgtgagtaggaaaaggaaagcttgtttaattaataatcataacacaaatgaaagaaagtaaatttaaacccctattgtaacacagtattaaaaaatccagatggattacagaattgattttaaacaataaaacaataataatcttaaaataaattataggagttcattagtatagcctgggataagggagaattcttaatcaagacaagaaacctagaagaaagaaagaaaaagattgatatatttcattacataaaaattgaaggccaggtgcggcagttcacgcctgtaatcccagcactttgagaggctgaggcaagcggattacttgaggtcaggagttcaaggccaccctggccaacatggtgaaatcccatctctactaaaaatagaaaaattagctacacatggtggcacacgcttgtaatcccagctacttgggaggctaaggcgggagaattgcttgaacctgggaggtgcaggttgcagtgagcagagattgccactgcactccagcctggacaacagagagagactctgtctcaaaaataaaataataaaataaaaattgaaaagatatcacaattaatcatcagaaaaatgacaaattgagaaagaatagttgtactacatataacagattaagggttaataactgtgatctataaagtgataaaatagtataaaattgggcaatttatatgaatagcaattcagagaaaagcaaatctaaattatcaacaactatttgaaaaggagcttgaactaatagtagctgaggaagtactaattcaaataaaaatgtgatatctattttgcactatcttcactggaagaattaaaatgtagaagaataaagattatattagctatctatttctgtgtaacaaattaccccaaaacttaaaaccgcaaatgtttattatcttgcagttttcatggctgagggtctaggtatggctctgctgactcagggtctcgaaggctgcaattaacgtgtcaattgggcctatggtctcatctgaggcttgactgggagaaattgacttcaaagaccactcacatggttgttggcagcattcagctcccacaggactgttgggttgagggcctcagtttcccactggctgttaatccaaggcctccctcagttccttgtcccatgggcctctccacggaacacaaagtgctccatcaaaatgagtgaaccagacagcaggagagagctaataaaacagaagccagaggtctttgtaacctgatctcagaagtgacatgcattattctttccatattctattcattagaagcaaattactcagtccagtctatacataaagggaagagattaaacaaaggcataaataccaggaaagcggatcactggcagttatcttagaggcttcatatggcagttgtggagaaaaagactgcaggctaacattgttggtggcaatggaaactgatacagctgttttggaaagcaatggcattaagatcagtccctccgcatctcattcagaggtcactttggtttgctaggttatttcccgattttacaactgcaagcccacatcctggaaatcccttcagtcctaggcaaaccagcttggtttgtcagcctactctagagccagactgtctgggtttaaatcatggctccatacttaactagcaatgccaccttgagtaagttacttaatttctctatgtctcagcttccttatttgtaaaataagcatgataatatcatgtttgtgggaaactgagacagtacctgtaaagtgcttaaagcaatgtctggcacattaaaaattctcaatgatatccattgttactatcatagatattaaaatatatgtatcctttcactaaggtatacaaacatttatcatccaaactgggaaacttttgagagtgaaaaggagtgctagtaataattatgccaggtcataaacaggaatattccagggagacttggatgtatgattaacttacatttgacccacagggaaatttctctcatagaaataaaggcacctcagtataagggaagtacacagtgatgtttgttgcagttttgtacttagtggaaaataaaaaagtaattcaaaattaagtgaatgctcaccagtagacaaagaataaatcacaatacataatgtttttaaatattatgcaacacttaaaacaatgaaatacagtgacaccaactgacttgaagaagttctttgaaatatctttgagtaaggaaagtaatatgcacaaaagtacaaatagttccatttgtaaaacaaaaggtttacactcagaggcaaatattgcagcttaagcttcagggtccagctctttcataggcccctcccaagatgttgagaggggtctagaaatgtttcctcatggttacatgtttttgtaaattatgcaaaagtaaaatattttaattgcaataggttaatacctctgtttctttcacctttaatttccctatcatatttctctgtattttgggtagtatttgaatggctgcagacatttttggaatccagctaaaggaaagatgaatcttgggcacatttagtttgggtttagtaatatatatttatgaattctgaagtcactcccatgtacatacagttcagatgtaagaatggcttctaggaatacccctaccacctcctgtgccaactcatcgggtatgcaacagaaagttttaaagccatattttgatatgggtgtgacctatgatgttcggtaccagaaatatttgtgtagtgagtgagaaagatttgaaatgtacagaactagccagtggaaaattcttccaaatcttcaagcttggaagtgaaagaaggattttatcaaagttgacaacaatccccaaaatcagcgtgacagtaccaataaccgattgtgaagctgaaataaactttctaacaaacaatgataaaacattaattttgatcaatcatgctagaggaaagaccgaattacccttttattttctctatcagagcattcttcaacagaaatagcgtgagccacatatgtaactttaaattttctaatacccatattaaaactttttaaataggtaaaatttaatgtttatttgacccaatttacttaaaatattagtatttcaaaacaaaaattactaataaaatattttacattctttttgtgtactatgtcttcataatcagatgtgcaatttatacttttagcacatgtcaattcagacagtaaactttaattgaaaatacacaatctatatttagactttgtagaattacagttgaaaaagtggattcatataaccaagtttttctaaacataaagttttcaaataactgaattgaacaccaaaaatcattttcctttaatatttggacctatgttgataaaactggttcattacttttaaaagaattaagttgactttgaaatataaccatttcaactttaaaattatgtctgcccaagtttaagtaaattctctgactcagcaatattaatagaaaagtcaaaggggtattgcataaattttaaaacagctctaaatttatcaacattaataaagctttcttcaaatttgttttgtttttgcaatacatttccataatgctattgaccatcaatggatggatggatacagaaaatgtggcatgtatatacaatggaatactgttgagccttaataaaagaagaaaattctgccatttgtgacagtatggatgaacctgggggacattatgctaagttaaacaaaccaggcacagtaagacaaatactgcatgacctcacttgtatgtggaatctagaaaagtcaaactcatataagcagggagtagaataatggttaccagacgttggagaggtgggtggaaggagaaaggcagaatgttagtcgaaaggagaatgttagtctaagttgcagttagaggagaggattaagctttagggatctattgcacagtatggtgactatagttaatacattgtatatttcaaaattgctaaaaaatagattttaaattttaaatgttctcactacaaataaatagtaggtatgtgaggtgatggatatgttaattagtttgatttatccattccattatgtatacatatatcaaaacattacactgtatcccataaatatatacacctattatttgtcaattaaagatcaatttaaaaatgaaaaatttaaaaaaatacatagatgactaggacatagagtataccctataagagagagacataaataacatgcatgtattttaaatattcaaaaattttttcatattgattcatattaatgtgtaaaataattatattgatttgttttatgaaaagctctgtttcaacacaactctttgtgtccttctcactaataagctcttcctttccttggagcttcaaacttagcttcttcatgtgtagtgtgatatcaagaaaatgtaggcacattgccatttctttacttactaagaaaagatatttttaatatacttcaaactgtgcaataaatcaataaaggaatttttttgttttaaaagtcaaaaaatctggatttttgatctaatataacaggaataccacatgttgtgatagatactaatgttttcacatttagtagaaattatttctttgatgtaaattttaaaaatctatttcatgagtttgattatttaggctatgagttgaaaatattttttaatttagcaaatctgaaggttgagagaaagcatactcaaagtgttaattaggcagtgtctcatgtcacatgacttacctatagctaatgaaaaatatctgcaattaaacatgttcttaataagttacatatgacattatttaggaaggtttttgtattcaatgaacagttgtttggtggtttaattgaagagcttttggttgtttttggcaaaatatcttcattagttttttcctcaaattttctagcaaaattttcattactgaaattacttcttttaccagatctcacttaaaatgttcttccctttgtttggaacctaatccattttatagctggcaaaaattacaagctcaaatccttccaaaaattgtttttatattttgtgttggatatttaattttgattcaggcaaataattttcactgatttttttttttactgttaagagcaaatgtctttttttaaaaaaaaattcaatagcttttgaggtataagtggttttatgttacacgcatgaattatatagtggtgaattctgagatttttgtgcacccatcacccatgtagtctacattgtacctaatgtgtagtttgtttttttatccctagctaccctctcaccctcctgcttctgagtccattatatcactctatgatgcctttgctgacacatggcttacctcccatttataactgagaacatatggtttttggtttcacactcctgtgttacctcacttagaataatggcctctagcttcatgcaaattgatgcaaaatacattattttgttccttttaatggctgagtagtattccatggcatatatatactacattttatatactacattttctttatccactcattagttgatgtgcacttagcttgcttccacatctttgcaattgtgaattgtgctgctataaacatatgtgtgccagtatctttttcatataatgacttcttttcctttgggtagacctagtagtaggattgctgtatccattggtagatctacatttagctctttaaggaacctccatactgttttccacaaaggttgtactaatttacattctcaccagcagtgaataggtgttcccctttccccacatccacaccaacatttgttgtttgactttttagtaatggccattcttgcaggagtaaggtggtttgaatttgcatttccctgattagtgatgctgaacatttttttcatatgtttattagctatttgtatatctccttttgagaaatgtctattcatattccttgtcaagtttttgaaggaattatttgcgggttttttgttttttgttttttctgatttgagttccttgtagattctggatactagtcctttgtcggatgcacagtttgcaaatattttctcccattctgtgggttgactgtttactctgataattatttattttgctatgctaaagtgttttagtttaattaggtcccatttacttttgtttttgttgcatttgcttttggggtcttagtcatgaattctctgccttggctgatgtctacataagatttttcaacatcgtcttccagaatttttacagtttcatgtcatatatttaagtctttgatccatcttgagttgatttttatatgtggtgagagatagggaaccagtttcattcttctacatgtggcttgccagttttcccagcaccatttattaaatagggtgtccattcccaaatttatgtatttgtctgctttgtcaaaatcacttggctgtatgtatttggctttatttctgggttctctattctgttccatttgtctatgtgcctacttttataccagtatcatgctgttttggtaattatagcattgcagtataatttgaagtctggtaatgtgatgcctccagatttgttctttttgcttagggtcactttggctatttgggctccttttgtggttccatatgaattttagaatggttttttataattctgtgaaaaataatgttggtattttgatgggaattgcattgaatctatgaattgctttgggcagtatggtcatttttccatgagcatggggtgagttttcatttgtttgtgtcatctatgattactttcagcagtgttttgtagttttccttgtagagatctttcaccttcttggttaagtatgttcctaggtatttttatttttttgcagctgttgtaaaagggattgagttattgatttgattctcagtgtgatcattgttggtgtatagcagtgctatggatttgtgtacactgattttgtaacctgagaatttactgaatttgtttatcaaatccaggagtcttttggagagtttttagaatattctaaatataaaatatcatctgcaaacagcaatagtttgacttctatttgaatgccttttatttctttatcttgcttaattgctctggctaggacttccaggaatatgctgaaaaggtatggtggaagtaggcaagcttgttttgttcctgttctcggtggggggaatgctttcaactttttcccattccatatgatgttggctgtgggtaggtcatatatagcttttattattttgagataggtcccttctatgcctcatttgttgagagtttttatcacaaaagtatgctggattttgtcaaatgctttttctgcatctattgagatgatcatatcatttttgtttttaattctgttaatgtaatgtatcacacttattgacttgcatatgttaaaccatccctgcatccctgggaggaaacccacttgatcatgatgaattatctttttgatgtgctggatttggttagctagtattttgttcaggatttttgcatctacgttcatcagggtaattagtctatagttttcttttttttgttgtgtccttcctggtttgggcatcaggctgatactggcttcatagaatgatttaggaaggattccctctttcttaaccttttggaagtttcagtaggattggtaccaattctctttttaatgaatgtctggtagaattcagctgtgaatccatctggtcctgggcttttttgttgttggcaattttaaaattatggattcaatccactgcttgtttttggtgtctttatggtttctatttcttcttgatttaatctatgagtggtgtatgtttccaggaattgacccatttcctctaggttttctagttcatgtgtgtataggtgttcacagtagcatccaatgatcttttgtatttttgtggtattggttgtaatgtatccagtttcatttctaattgagcttatttgaatcttctctcttcctcacctggttaatctagctaatgatctatctattttgtttatttttcaaagaatcagctttttatttcattaatctcttatatttatttgtttgaatttcatttacttttgctttgatctttgttatcttttttcttctgctagctttgggtttagtttgttcttgtttctctagtcccttgagatacaacataaggttgttaaaatttgtgcccttccagtttttgatgtgggcattgagcactataaactttcctttagcactgctgttgctgtatcccagagaatttgataacttatttcattattatcattcaattcaaataatttttaaagttccatcttaatttcattgttagctcagatatcattgaggagcaggttatttaatttccatgcgtttttatagttttgagggttcctttttgagttgatttctggttttattttgctgtggtttgagaagacacttatgatttcgatttttaaaaatttattgaggcttcttttctggcctgtcatatggtctatcttgaagaatgttacgtgctgatgagaagaatgtatattctattgttctagggtaaaatgttctgtaaatatctgctaagtacatttgttgtattatgccatttaagtccaccgtttctttgttgattttacgtctcaaagatctgtctagtggtgtcagtggtaaattaaaatcttccactattgttatgttgctatctcattttttaggtctagtagtaatgtttcataaatctgggagctccagtgttaggtgtatatatatttaggatggtaatatctttttgctgggttgacccttttatcattatatagtgaccgtctttgtgtgtgtgtgtgtgtttttttttttttttttttaccattggtgctttgaagtcagttttgtttgatataagactagctactcctgcttgcttttgtttccgtttgtgtggaatatctttttccacccttttgccctcagtttatatgaatccttccacaaggattcatataatgaatctcctgaagacagccaatatttggattgtgatattttaaaatccattctgccattctgtaccttttaagtggagcatttaggccatttacattcaacgttaatattgagatgtgagattctgttctcttcatcatagtaatttttacttagtttttttcattatgtcattgttttataggccttgtgagttttaagctttccaaaggttcgattttgatacatattgggcttttcttcaacgtttagaacaccttttagcacttcttgtagtgctggtttggtaatgacaaattccctcaagatctgtctgaaaatcactttatttcttcttcatttgtgaaacttagttttgtgggatataaaattcttggctgacagttgttctgtttaagaaggttgaagataggaccccacacctctctggcttgtcaggtttctgctgttagtctgataggttttcctttgtacgttacctgatgtttttgtcttactgctcttggaattctttgcttcatgtttactttagataacctgatgactatatgccttggtaaatatctttttgcaataaatttaccaagagttatttgagcttcttgaatttgatatctagatctctagctagaccagggaagttttcctcaattattccctcaaataagttttcctcaattattccctcaaataagttttccagacttaatattttctcttctctctcagaaatgccaattattcttaggtttggtcattttccataatcccatatttcttgaagactgtattcatttcttttgattcttttttctttattttgtctgactgggttaattcaaaggccctgtctttgagctctggaattctttcttctatttgttctagtctattgttaaaactttccactgcattttgtaacgccctaagtgtatctttcatttccagaagttcggattgctttttctggatgatatctatctctctagaaaatgtttcagtcatatcctgaactgctttaatttctctatgagggttttcatcattctctaatatctccctgagtagcttaataatcaaccttctgaattacttatgtggcatttcaaagatttcatcttggtttggatccattgctggagagctagtgtgatctttcagagatgttatagaatcctgttttgtcatattaccagagttacctttctgattccttctcatttgggtagactattccttctaattattcttaaatttatgtttgatttgactgtgtttttttttaatattccttttttcccctaaaagatgtgactttaatgcttatagttaattattgcctaacttagttcttggtactttcaggggtgaagactctgtaagatttccttggttatagtctttgcatgatggctttctcatatgctggttatattaagaacgttctcagtgtgtgagcaagttcactgtttactatggggttggaatggcagaggtctcttgatgcttatctcattcttccatggcatgtgcttatttatttatttatttatttatttatttatttatttatttttccccagtattttatttgctggtttgatggttcaggcttcaggccaataggggaggtgtcccttgacaggaaccagctgtggctaaagcaagtaggtaaatgcaatacccaatggtgggtagaggtcccagccttgacagaggtggctggaggagctcacagtgatttgcactaaggtcttatcaaggggaagagttgcagttacctcagctcccctgtcaggtcagcaggaaagttatccacctctcagacacactcctgtcctagtgctctggctatgcagatcggataggcacctcttttcatctgtaggaatgttgatactccatgtagaaagcaagtgactctgtgtcttatgcaaccctgaccctgtagggtgctcctcctgtggggatgcagtaaccctgacatgtttcagaaaggctgtctattgttgtacccatgctgagttcccatgggagaagccccaactgtgcctgccatggtggacaaggggggaatgacatctccttctccaaggcctatcaaatgcaccagggctgattgttgggttagagctgaagaatttccctgctgaacccagcactggaactgtgcttctgctgaaggaaacttcatatcagcagaaagatctggtgctcaaggcctgccatccaggtccttctgaaccacagggtattcccttgatttggtacactcccccttctcctaggaggtgggaatcctggaagctagactattatgaatgttgttgaagagtgaatttcttatcaaatttactatgtatttgtgaaatatacctcttactatttcccacttaattatctttaaagttttgttagacaacaaacagctgtttcagtttcctctgcattggcaaattacaattaccatcatcatgacatagacatgcttttctatgtttgtatattaaaggatatatactgagctttgagcattgcttaaaatgaaggtgagctgaagagtgggaacaattgggtcaggcaaaatgtgagacttgattagcattgcctatataaagttaggcattgtttacaggttttaattcagtgctacaagcatgtatgtctttagtaatttataagacattcaatatgggggggggacatttttcaaatataatgtgatttatattttttattgttgattcatatttcattatattatgatttcagattgtgacttatttctctgatgtgttgaaattgccacaatgacctaataagtggtcaatttttctcagggttttatgtgtgcttgaaaagaatatatatattctgtattgatgggcacaaagtcctagatatgtctattaaatcaagcttattaattctattattcaatagttctaatattatatttcttcatttgtcaatattctgaatgaaacatgacatattaaaatcttgcaaatattgtagatttctgtttctcaaaatcctatcagttttggcttttaatgtttcaaggctgtgttgtgtattgttgtatgtaaaaaaaattacggctatgatatcttcttggtattgtgctttctgtggtttgattcttttaatattataaagtattcctctttatcctttttaatgtttttagccttcaattaaattttgactaatgatagtcctgcaatgcctttctttatgttggttttgcttgatctttcctattttaacccaattctttcaaactttctgtgtcactttgatttaggttttactcttataaaaaagcatatagcaagaattttaaaaattgcatgcaatataatctctttgtctttcattagttatcttctccttcgcatttttggtttgccatgtttcttctttgcttcactcttttttccaagaactagggacattttaattaataaattgttgctttattcttttagtcttcattattggtttcgaagatatattttcctaatttttagtggtttctcttaaaatttttaccagaaatgttttttaacaaaaataaaaattattaagtacctttgtttctctagttctttagcaaacctctatcttgcttgtttttattgtctggaaatttaatatgcccagctgctcattctcagcagaggggcagactttctggccctagctccagtgaagctcttttagactccattaccattaagaatgcaatctccccactgctctgcccactgctggaccaagtcacgagctgggctgctattcaagtcccactttctattttgtgcttctgatccagttgagcatcaagatattttctttgcttttcagcacaagtaacgtttataattttctgtttttctattttttctttcattattgtttggaacactgggcaggagaaaataggggaaggattgctttaacaaaaacttgacagatcttgccatgatgacagagccattatacttctataataagaaaaatgtttaaattaattaaaaaatgaatacagtacaaacgcaatcccagaactttgggaggcgaggtgggcaaatcataacatcaggagtttgagaccagtctgaccaacatggtgaaaccccaactctactaaaaatacaaaaattagctaggcatggtggcacgcacctataatcccagctactcaggaggctgaggcaggagaatcacttgaacccgggaggcggaggtggcagtgagcggagatgacgccattgcactccagcctgggtgatagagcaagactccatctcagaaaaaaaaaaaaaaaaaagtacccacaaatgtatatacaccaaatgttcacattgatataaaaactatgcacagcaaagaaagaaaatacatcagaatattaaattagttgctgcaataagtatgatacggggaaagtacttttattctttttactttctatatattgaacaaaatttagtaaaactttattctattttataatgagaatacatatttttgagctactagaagagaaaagaagcattatattagtagctatgctaaaaattttaaagtaatacaatccaacagcaattaaaaggtaggcattttaagtcagctcataccttcagaaaggtatgccaccgtatctcaagatttacacaaatcacttttacacacgtggttatagtaaccaaagtatgcttcagttgaaatgataatccagcatcctcatagatgcctgtgactaaaggtcagttagtttcaaaaggaatggagtgcttagctgattcaatgctctcgacttgtttacggcatagcttttagcattccattattctctttttattgcctttatgcacaggtgaaaaacacagaaaacactagatgattatttggtaataaattgaatggttctatggaaatgaaaagcatagaaaacctatgtgattaaatggcaactgcagtttttctctggattctgcatataaatagaataggttctcccacagagaatgagcctggctaaatctgatagttaaatatacagctctggatgtaataatagtctttgaaccttcttgaatcccagtatctagagtgctttaagctattattttgccaagtactgtagataaagcctctctgttaccctatgtttaatatgtctttgttgtctttgtgtcttacacacctagttgacctggaaaatagtatgtcctcaacaaacgtttgtggaacaaatgaattggtggatagatggattaatgaatgaatgattttatgaaaagagatggttctgaacagtaaaaggaaacactgaattatttgaataatgcactgagaactacagtgatttctcaatgccagatttgcttctgaattcttatctccttcaacaaactattcccctattctgttttagtttccacaactgcaatatgacatctgatgataaatgtgatgaaatcacagatctggatatattttgtacattatttattgactgagattaaataacaaaattatttttaattctctatttttctaaattattcaaacctcatctgttaatacccaaaaataacacctaagaataacctagttttctcttttccctttttgtataaattgcctctgaaaggccaattgaagaactattatgagcttcttgaatttgtgtgttctaatataaacataaaatgtaatctattagataaaatctagaatacaatataatcaaggtaaaattgttactttttaaacatacagtgtgactgtattgtatgtcagttagttgtgttaatgttacttagagtctaggactatgtaaagacagaactagtagtcttcatataatactaaatgaaaagaaaatgaattagtaagtctgcagtagatatatctgacaagtctagaaaatgcaggtaaggtgaatagttaaatatgagactacaagcattacgtaagattgtaagatttctacaagattatattttcagtataaaactatttcccaattaatgttgtatgcagcagctgctaaatagagcaaagttactgagtgattccatgaagtaagagcttaaggctgggcgtagtggctcacgcctgtaaacccagcactttgggaggccgaggcaggcggatcatgagatcaggagatggagaccatagtgaaaccccatctctattaaaaatacaaaaaattagctgggcgcagtggtgggtgcctgtagtcccagctactggggaggctgaagcaggagaatggcgtgaacctgggaggcggagcttgcagtgagctgacataacgccactgcactccagcctgggcgacagagcaaggctccatctcagaaaaaaaaaaaagcttaattgttagtatgtgctgaaattacacaattgtgagttccaagagctataatgatattgcctcttttttaatttttattttagtttcaaggctacattttcagatttgttatataggtaaactcgtgtcacaagggtttgttgtacagattttttaatcactcaagtactaaacctagtatccaatacttatttattctgatcctcaccctcttcccaccctccacccacaagtaggccccagggtctgttgttcccttcctggtgtccatcatttagcacccaattttaagtgagaacttctcacttaaatgatgatgagcacttctcatcatttagcacccaattttaagtgagaacatgcagtatttggttttctgttcctgtgttagtttgctaaggattacagcctctagctccaaggctcaaaaaataaactcaaaatcatgcaattacatggaaattaaacaacctgctcctgaacgacttttgggtaactaataaaattaaggcagaaatcaagatgttctttgaaactaatgagagcaaagatacaacataccagaatctctggaacacagctaaggcagtgttaagagggaaatttatagcattaaatgcccacatcaaaaatttagaaagatctcaaattaacaacctaacatcacaactaaaagaactagagaaccaagggcacccccaaagctagcagaagacaagaaataactgaaatcagagctgaaatgaaggatatcaagacatgaaaaaccgttcaaaagagcaacaaatccaggagctgatttgttaaaaaaattaataagataggccactagttaaactaataaagaagaaaagagagaaggtctaaataaacacaatcagacatgacaaagaggatgttaccactgaccccacagaaatgcaaataaccatgagaggcaactatgaacatctctatgcacataaacgagaaaacctagaagagatggatgaatttctggacacatacactcttccaagactaacccaggaaggaactgattccctaaacagcccaataacaagctccaaaattgaattaggaataaatagcctaacaaccaaaaaaagcctatgactagactgattcacagccaatttctacccaatatacaaagaagagctggtaccatttctactgaaactatttcaaaaaattgataagggactccttgcgacctcatcctatgaggccagcatcatcctgatactaaaacctgccagaagcacaataaaaacaagaaacttcaggccaatatacttgattaacattgatgcaaaaatcctcaacaaaatacttgcaaacttaatccagtaacagaccaaaaagctaatccaccacaatcaattaagcttcatccctgggatgcaaggtaggttcaacatacacaaatcaataaatgtgattcatcacataaacagaactaaagacaaaaaacacatgattatctcaatagatgcagaaaaggctttcaataaaattcaacataaaacctctcaataaactaggtattgaaggcacagacctcaaaataataagagccatatatgacaaacccacagccaacatcatactgaatgagcaaaagctggaagcattccccttgaaaactggcacaagataggatgccttctctcaccactcctatttcacgtagtattggaagtcctggccagatcaatcaagcgagagacagaaataaagggcatccaaacagaaatagaggaagtcacactatccctgtttgcagacaatattgcctctttcaggagcattgaaaataactcttgtcagggtttcaactgcacactagccaggataatctaaatttaaatattacaatgtataagcaaaaatagtagttaaaaatctgtatctttagcagatgcaaggttattgcagaagtttaaggagggtgatgcaatcagatttgtggttttaagattactttgactgcaatgtgaataataaattcacatttctacaaagaagatacaatctacagaatctctgggacacacctagggaagtgttacaagggaaacaggactttaggaaactattataatagtccaaggaagtgttacaagggaaacaggactttaggagactattataatagtccaggacagttattggtggtgacggagattaagagaggcagatggatttgagagatatttagggatagaaatgtacataattaccctcatcctactgtttattccagctaaaagtcacaagacctggcgcttatttgaatatgaggaattgatagggaggttgcaataatgaccttcaggctggatgaataattaaatcatttactgagatgagaaattcagcatgaagaaaaggtttggggggaaagatgtgggagtttagttctagatatgctaaggttgaggtgcccttggagatatataagtaaataagtagatgatattaagtagatatacaagtaaagatattagatggattaatagatgggcctggagttaagagaagtggtctagcctggagataagtatgtcggagtcttcagcatgttgattgtaacagaagccgtactatagatgagataatttatagagagaaaaaagtaaaaagaataaagaggactgtttacgagccttgaggaactctcaacttttagagtcatgcagaaaaatgtcagccatcacaatagagaaggagcaccataataagatgaaaatctaccttagacgacaaagggaagaaagggtctccagatggaggtgtcgccaacctgtgcttctgagaggttaagaaaaagtgaggatcgagaaatgccctttttgattttgtgacatcaaggtcattagtaactttagaaagcacatttccacagagtaatggggaatagacacctgactaaagtgggctgagaagtgaaaacaaagaaggaaaatgaacatattgagagcacgggaataaagagagaacactagctgagtcgtcaggtgggatcaaggaagttttcatttattgtttagttgtttttgctgttagttgttcttgtggtttgctactgcttttcaaacgataaagacccgagcagatttaattgttgatgtgcacaatgcagtaaaaaaggacaattcactttgggaggccgaggtgggcgggttacgaggtcaggagattgagaccatcctggctaacacggagaaaccccatctctactaaaaatacaaaaaattagccgggcgtggtggcgggcgcctgtagtcccagctactcgggaggctgaggcaggaggatggggtgaacctgggaggcggagcttgtagtgagccgagatcgtgcccctgcactccagcctaggtgacagagggacactctgtctcaaaaaaaaaaaaaaaaaaaaaaaggacaattaaaattatagaggagagaaagactgaatgcaggggtcaaattcctgaggaggaaaagacctggcgcatagaagatggagccaaccttgggcaggaggaggaaaaccccctgtatcttaacaggagcagggagcaagaggaaggttacagggcagttgcatttaatcacctaatgaaggaagttaacaaagttccatctggtaaattctattttctttatgaattaaaatatgagaccatctgctgagagtgagagacaagggaggaaaagtatctcaggattgaggaaagcaatacagaacaagagtggaatgtgaagcagtgtggtaagtccactctactttcatgagcatgaacttatgaattaatgaatgtttaccttgttattatacatacactgacattataggagaaattctgttgcataggatagcatacacgacatcataaagagcctatattcccacatcatcaaatcatcaacctagcaggagttcattgtatttttagaaatcttactagtctacaattcatgttattcacacacagtggaaacaaaattgatttcaggggagaaaaagtgtgtgtgtgtgtgtgtgtgtgtgtgtgtgtgtgtgtagtttataatattgttttccaactacaacacatttccactaagttgaacaaattgagatgattatattttttaattggtaaactgtccatatggatgaaggaggcaggtaattcccttcaggtactgctttccttgatttctctctttgcccatccatgaactagcactggtttacaaatttatcatgtagatatctgctttaataaatggctaagacagcactgagcacagagcaaatgccaagtaaataattactgtttgataaaagtgcttcttatcagcaaggccagtatttgtgtgtaaaataatgcttccatggggctcaaaaatagtttgctctcttaaatgagttaaatatacccacagaaatcatgttgacactacccacttgctcagcagagataaacatttgttctagtccagtctgaattcatttaatttcaaaattttggcaatagaattaaggaagtttcaccattcaaaaaatatttaggtataaacaagttacagaatcaccctcacactcctacctatttcagatgttgcagaaggtatagtagagtgtggattattcaccagatggcattttcatttcaggttgaccacagtccagtaagcacattagcaaattgaacagaggtaactaagacccacactatcttggcatgcagctgctgaatgtgtcctttttttatcagagatcatctattctctttcaacatgattggaagcagtctttgctggtggttttgtaaattgctcattaatcaaaatggatttatcgggcatccatagtatacaaagcctgtactaagtgattcaaaataacggttgcctagttaccttaaaatggaaaaattcccctaggaaggttaaaatcaaaggaaaaggagacaagaaaacattatatttgatgacacctggctatttcataagggattttactgccattacagccattttcttttaaacataatatccatccattcattcgttcattcaattattcattcatttatgcaagtgagtcaccactataattaaacaaggtctttagcttgatgctataaaggaaacaaacaggattcaatagtggtcgcataaacatgagtcttagcaaattcaccaagcaagtgctagactactgttggtctttatttaataagtccagtactagaacaatcttattctttacttcatgtgaaatctgtagtcatgaggcattagtaaaatgctccttggaaagagtatccttcattttctggttgaattgtaaaatcttgctgaatacagatctactaataagttgcttttatttaaattaaactagtacatctgataattttttttttcctgtggtcaggattagatttattttgtactagcccttctagtttttaatacaagagaccacagaaaggaaagttaactttgattttctgagcaaatgcatacttataccatgaatacacaatgttgccagtcacaaccaaccctcagctgctcagcccctgagaaatgaaagccaggcaggttgtgtgctgtactgtggcccaagcatcctcaattgcctctccctattatgtattgaatttgtgtgctcagttttaatccctatatttgttacctaggggtgcttcaacaaactacagccatccctcagtgtccaaggggaattggttcccagactccctgttgaggaggattgggtatttgaggatacccaaatctacggatgcttaagtctcttctataaaatggtgtagtgtttacatataacctattcacatcctcctggatactttagatcatctttagattacttgtaatacctactgctacataaatagttgttatacagtattttctttagacaatgatgacaagaaaacaagtctgtacatgttcagcacagacccacccatccatttttgcttctgacatatttttaatttgtagttggttgaatccatggatgtggaactcacagatacagagggccaactatactagtaactgggtggcttaaacaatagaaatgtattgtgtcacagctttcaaggatagaagtccaaactcaaggtggcagggatggttccttctgtgggctgtgagggaaggatctgtcccaggcctccttggtttgcgaatggctgccttttcctgttatatcttcacattgtcttccctctatgggtgcctgtctctgggtctaaatttcccttaaataaggatactggtcatattggattagggtccacttaatggctttattttaacttgattatctttacaatgattctatatccaaattccccaaataagatcatattctaaagtactataggttaggattccaacctttcttttcgggggcataatatgggggggacacaattcaatctataacagtccctcttaagacttgatcacccctcagtctttctctttctctctctctctctctccacccccacctccaccaccctgtctctccaggaaatcttcatgcagttcttgtatagagtagtaatgcccattttgtctgtaagcctaagccatgttacctaacacagttaacctaaagcattgaatgcattccctgaagtacaattctcaaatttccttgaccccttattgtccaagtgtcagcattctcaagatgagaaggatgagctttactcctacatgcttctcagctttgtttccccttgcctttctctgctgcaattgtctttgttctggccactgtcatttcttgctgagtgtatgcactgatttgctaatgaatcttcccgctttcaacttcatctttctccaatctatactctatactccacattgcttctagagggatcattctaaaacagaaacctgatcatgccatgttcacttctgctgtcagatgaaatccaaacttctgcctgttactccttgttctttatgcattctaccctagtatcattctatgctctaaccatgccaagtgggcatagtctctgaatgtactctgttctttcaccctctctgcatctctgcacacactgccccttgcctggagtgccataccttattcatctatctaactcctccttctttgaggctagcaaatcatgtagcacttcctcccacaagccttccttcattcacattcctccccttctactctcccagagcaccctatgcttatcttgttcattgcccttattatccttaattttaacacattctaagctcctaaaggtcaacacttataccttttgctctgttccttatgcaatatttagcacaatgcctagaacatcagaggtactcaataagtgcttattgaatggatcagaactatagggtatttacccaccaagatcaatttgagggtctctaaaagactcgtgtgcatcaagaaatgtctccacgtttgcaaattctacctttactcactaaagaatttagtaacaaagggaatacatcagtaactccaagagaggtcagtaacttccctgagttctccagatcagttagttggccctaagggggaaatgcatagctaggtatgagtcacaagggactagtcatagcagttgagagacttggaagtaataggattgatgcaaaacctaaactatgggttaatggaatcaacagaggaaaaaatgcaaactatttccttacctaaccagaaaagaagtaacagttatgttgatgctctcctctacctgctatggcgcttattgggggcaattctgtggggctgagtggataaggtctcatataaaattacatagaaactgttttgatctatattcatcccaattctaatcattttttaaaaaccacaaaatttccctttaaattctggactcctttaccttagaattcatgatcacagcccaaagactatcaattattatgaattaagcctgggtcaactgagcaaactggcttcttctatactaaacccaagtgatcaaacacaattggggaaaattatgtagccatgcaaactaagtctttacccaattttaacaacaacaacaacaaactcaggcattgtaggagtttatattttctgaaagtggctgcaagaatatcttcttataatgtgactttagttaacactccttcatcaaggggaggcaagaattaaattccctccacttaaatgtaggcaggcttttgactacaatggaagtgatgttgccttctgatgtctcattttcttagaatgtttgcttagaatcccaacacagaccacgagaaagtccaagtaggccatggcagcgatatgagtatggatcttgagaataaaacctccagaccccagttaagcttcccccgttgacaccacatggaacagagacaagctatccctgccaagccctccccaaattgcagatttaaaagcaaaacaaatgactgttgttttcactcactaagctttggagtggtttgttatgcagtgacaataaccagaagagattttgatagttggatatggggtgctgccaaaacaaaaacttaaaatacgtggcattagcaccgagattgggcagcagacagaagctggaagagccccaaagccagtgcctgtcaagccaaaagggccaaggaaggatggatttgtggaagccttaaaagctataagaaaggtgttgatgaaagcttaaaggaaagaaaacgtaactgtaagctgaaagaaagtttcttctctctctgcagtgttttacctagacctgtggcaaaaatctaagactcactccctctctctgtgcatgtacaaagaagaggtttggtaagcagggtgatgacagccttcaacaagccaggaagagagctctcaccagaacctgaccatgccagtaccctgcagatttccagcctccagaacaaggacgtaatacaaatgatgcagcttcctcttagttctttggggatgcttgctctcagaatccaggcagtagtcaggaggaaacccaagcagtgcctggagagcaaaaaaggcctccagtccattgccttagccaagttactggtacatagccaacactaactttcagccatatgagctggccatcttaaaagtgttcctctattccccagttgaacagcccgagatcataagatgtgacacagataatcagtccctgacaagccctgtcaaacttgcagatttgtgagcaaaataaatgactgatgtcagtttgttttggggtggcctgttaataacaatagataactgatacaggcatcatctcctttatgtcttcctcaagctccaggtaaggttaagtactcccccatttttgctcccaaagaactctttgtgaaacactatcttagcaattattgtgctctgttgaatttaactcttcacttgtctacctcttcgagctcaagggtaatatcatgctttttgaaaaattacctcctcaaatatattatatttgtcacattctctctttcttctcctctggaactttgattagacgagaaaactttgcagtatatctttcaagtctctcagcttctctttcatattttccacatttttgtctctgtgcaacattctgaaaaatttcttgtggcttaatttccagttcactatatctcccttcagctgaatctcatctgctgttccactcattcattgagttttaaattgcatgtgtgtatgtgtaagtaattggaatttttttcatttctaaaagttttttttttcctctccaatatgctaggtcattttcttttagtttctattcccaaaaaatatcttcaggctcactttttctttataatggcacagtcattgtatagtctacatctactaattccagtatttgaaagcacttaaggtgtggatcggctcttccttgtttttgttggttcctgttgggttttctttccctataggcttaattattagaaactgttaattttaataataggaaaattattcatagaaattatttggggccctggaggagagtatatttctctccagagggattacatttgcttccacttgatacctgagggtattagtttaaatgcatgaactgacattttttggaccaccaaggtgatatgaattttgtgtggcaatctgtgagggctagttagtagtaataattcttcaggaatttcccaccccctgacctgccttgttctgctcacaaaaaatcatctttccttggagtccccttggggtggggaatacaggattacctctgattcctctaaggctgtagcccttggaatcctagttctatggaggaaggatttcctattacagtccctgagctggacaggctgtgtagatatttgttttcagtatccaaagccacagaagtcttgagcactgaagttcattagcaggttcagtaagctcccccaggacaaatgtgactttagtgcagcatttatttcctaccctcgccaatgttttggcttgattatttcttactaaccaactaataaaaagaaattcctaatttagatgtgattcgatttctgtaattttcatatcagctttttgatacttttaagaagtttttttcttttctatatcgtatccagcatttttatttgttttcagcaagagttgacctgagcctgatcagccttgttatctgtgtccatgtcattttcatccttgtatcctcagcattcaaaattgtgccccagcatgcataagaactcaattagtttttgactacttaatcaatacatagctgtgtcttcaattttgcattccttcctctatcacacctgatattcccctaccctctgtgccccaattaaagctctttcacattttgcatatctatttcctgcattttcctattttaatgaagcttccccccctgaatatgctatttccctcattatctctcttacggaaaaggaaaagttctcattcttgtcaacttccatagcctggggtcagcattgttttcattctccatgaccgctgtgggtcactttctattatttggccttcatccaaactctgatgctcatctgaagtttacactattctattataacattctttttgtaattttattgttatcatatgtggacctccagtcatatctctacatttcttgagggtttcagtatttgattcctaatatctaccccacctcatcccctagtaaaatgcagcactacagcatagtgtttaagagcacaagttagacaactcaaggtcaagtaccaaatctacccctcattaacatgtaaccttgggaggccagctaatgtttcaatgcctcagtttccttatctctaaaatgagaataatgatattaatacctcacagcattgtaagaatcatatggaataatgcatataaagcacttagaacagtatctgccacataataaatgctcaataaatttactattttcattactgcactattaccttaaaagtcttccttctgtatgtttatgattcattaacaccctagcctcagtactgctcaaaaatccatttttttcacttgtacaaaattccctagactattacgtataatggcttttctgaattttatttacttatttatttagagacagggtatcactgtgtcacccaggctgcagtgcagtggtgtgaccacggtttactgtagccttgacctcccaaactcaggcaatcctcccacctcagcctcctgaatagctgggactacaggcatgggccatcacgtccagctaattttttaattgtttgtagcaatggggtttcaccaggttgcccaggctagttttgaactcctgagctcaagtgatccacccaccttgtctaggattacaggcatgaggtagtgtctgtaataggctagtgctaagaatataggcatgagccatcgctcctggactgaattttaatttaacccttcttaagatctagctcttactttcggccaataaccttttatcttacccagaaattgaatccatttgaaaataaatatttcagaatttctctatattcataaccatgctgtcttctcgctactctgtggggaagcaaggtctgtgtttccctaaactagctgagtcttaacttctacccattctgttctttttattctttatcttcaataccttgctctaccagaaaattcctctaaacttgatcaagtcttatttatcctaacataaaccagctatttccctcttgcacctgctttcttcttatgttactatcatacctcttcttctaatctccttgaaagagtcatccgtactctctactccatttcccagtgtcttatttcccatttcccaatgtctcactattaacttccagacatctacttgtaccacatcacttctaaaatttactattcaaaagtaagttgcgactgcattaccaaaccaaaaaaaaaagcctctcttcagaatttttcttacaactccttcacagcattaaatatattgaccatccacttgaaaatttcctccttcattagctttcatataatcactctgtattctttcttaaagtaatagaaagaaactataatggtagtcaaaaatccatgttcaagcataggccccactattgctcttaaaactctaatttctttatcagcaaaatagggataatatttgtcttgctttgttcactagtttgtaatgcaaaaaataaaacaaaataatgaatctgataatgccataaaagacatgaaatatataaagcagctaagtaagatttgataacttggtaacagataggctacagaaaatgatacaaaaattgctaccaattggctgtgaactcctgaaggaaccaaagctgtgtatcttacctagaaggttttttcagtattaaaaggtttcaaagcatcttcatcaaagcattaccatgtccattatggcttttaccaggaagttaggagacttcaaataaaaaaccttctgacctacctggactcacttcaaaatgaaaaaataattattggaactacattgggggaactttcattttgataacatagtaggaaaccaaaatgttaatgatgcatcttcatatgaataagcaagtaaattgaatcaggccaattgtgagtaagagatattaccagttcttggggaaggtgcccttgcaatttctaaggagcaaggtttctttgtaacagctgtgtccatgagatcacacagaaagttctcattttctgaaggaaatgtatccagagaagcagatggtacaatttccatagtgtaatttctcttctttggataggactcctgaaaagaagaaaaaataaaaacagctttgtgatgaagaaacagccttgtttaatttataaaaactagaaaagataatcaggttcattagttctttccaaagtgattgacagctgatgattcatctgtttgaataaattatagaatcatgtaaacccaatatcagtgatatttttaagagtcctcataatttaaaaggactgaatttattactgaattagtaaaggtattgcccttttttgtaatatatatctattatctagttgtggcataaactgctggttaactaatcaacagtcatccccaagactctactcctttgccggcctcctggagacacccatataactcggagacacccatataactcaactttggcccattagatgtaagatgaagtttgctaaaaggctggtgggaaaaaatttttccccaaggaagaagcatataaggaggctctttcagagccaaggccatccccaggctcctctctttggatgcagttttgatatctggagctagggcaagcattttgtgaccaaaaggcaagaatcttcagatcaaaaaggtaacaagccaagaatggcaacagaaggataaaaagagcctgggacattgatcatatcattgagctgctcaaatagacccagggccagtttctccagtcttcttacataaataataacattcttacagtttgagccattgctaattgggttttctgtcatttagagttaaatgtcttgccatccagcacactagtatctttccttgtaaataccattaactaatatactaaggtactcttttcaggttaggataaaatataggtccagttctatatgattgattctttgatatattctaaaaattagaatttatttcattttataagattttgatttcctgtacataaggcattaattggtcaacaaatacttattgggcatctactatatatatgtagaatatatatagcatatttatatattatatatatatgtatatatatataatgtgctaaatgctggactgtttttaaactaatgagacataatccttgctctgaagaagttcacagtctgctggagaagactgtgaaattctgcatgatgaaattcacaattaatcatattttatttttgctacagatcctcctcagctttacaaaaaaacccaaagtaagttgaaaatattgtaagtagaaactgcatttaatacacttaacctaccaaacagcatagcttagcctagcctaccttaaatgtgctcagaacacttacattagcgtatagttgggcaaaatcatctggtaacacagtacattgtagaatattagttacttacccttgtggttttgtggctgactgggagttgtggcttgctaccactgctcagcatcatgagagagttatctatcatagggtatattgctagcccaggaaaatattcaaaatctgatgtacggtttctactgaacatacactgctttcacaccattgcaaagtcaaaaactcgtaagttgaaccatcatgagttgcagaccatctgtatgtgctacttttataaagtatgcctcacaatcaagaaaaagacaaataagaaaatagactaatatttttgaaaaatctccctaagtatattctagggctgataaagatttagtacgaattcctagtttttctacagtacagcagaattcaaggtcagggtaattgctttcagacaataccagaccctcacacatcagagagtcaattatggtcatgatactccattgaaagcaggaaattgggagtaatttatttttaacaacaaagggtgacaaagtagaaggcatccagaggaaagtaatcaggatggcatataattctgaaaccatgtcagagaagaaatgatgaaaggaactgcagtgttctatccagagaagccttatagccacataatagttttctcaatgatttgaaaggctatccctcatcaactatcccacaaaggggggatggagaaaagttgatgtggtagatttattctaaggcccataaagacaagacaaagactaatgtttataagtcaagaagggcaaatttggctcaatacaaaaaataattttctatgaattaatgatattgtttaccttttaaaataaaaaggcactataaaatgagttaacaaatagcattataaagcaacagaaggaagtcctcattactgaaaatcttccagcagaattatctgctgataaaattgtggatgaaacacattgtacaatgagtccaacaggttactataagctccatgaaggctggaatttgtcttgtccactactctgtccctagaatctaatacaggtcctgccaatagttgatgagttgatgctcaataaatatgtattgatcaactgaacagtctctagtgtcctttaaacaaagctaactacaagttatggaaatgattttttttcaaatgtaaattattttgcctttcagttcagttaatattgttcaccagtttgcatataaaaagtgaaaaactgagattacaacgataagattgtaaagattctatggaaaaaaagagtctccagttaaactcctagttccatcctgaaattaaattaatcaaaacaacccatggatttagttaagttggaattttacagtgtgtatgaacacttctgaggatttttaaagcctcgaaaaccactttgaaatttaatcacaaagcatgggttaatttgctttcttccttaaaaatgaagtatataggtttattagagaataatttgaaaacataaagaaagaggaaaataatcacatgaaaatcaagcatgctgagataactgagggtaatattttggtgaccatcctcccagactgtttcactctgtgaatgtgtgtggacatgtgagtatgtgcaaaggaaagaaaaaatattttaaacaataatgaagtactccctcttctgcttcctaatggagggccataatttcttcttagaatgtaagtctttgtagaacctggcttccttagggaaggtgaggcccccgcgggaaggagttggtaaaaacgaagatagtgaaacaatgcttttgtaaccaaatatttcaatgtcaagaaagagagatagttgaacaaaatatctgacaagtgaccgtcaaaagaggatatgcaagataatttttttaaaaaaatggatccatgtgtccactactcagtttaagaggtagaatattaccattgtatcattgaaacctgtcccccaacccaccccatgttcatctttccaattttaccctttttcctcctctaccagggctaaatgctttctgagctttgtgtttttaattgcttggactgtgttaaattttaactatacatgtaagtatcaataaaaaataaatttttagtactgtatgctttcaaactttatatatatagtatcaaatgctctagttcttctgtgatttttctcaatcaagattatgtttctgaatttcatctattttcagtgtggtacaggagctcattgtttaagattaccacaattcatttacacattctcctgacaatggacttttaaatgtttcctaggtgttttgttatttaggataatgttattataaattttcccatatgaagtctcttggagcaagtaaccagggttatgctgcctattctagtagtgatggggaagagtcaagaacagacagcagacgagaaaaataaatgaaatcaagagatgataatgagaatggaaattgtatgccctgtagattctatagaatcttaaggatagcatttgcagttttctacccaaagtggcaggagggttcaaaggatattctgtaaatcttattaaaatattatatataagtatagtattatataaaatatttcctaatctgttatttacctctaatgatatattttatacccttttcaatgacaattatatgtctacatgatgaacttgggtcccaatatatacctggtcataatttatttggccaatcctatcatattgaaattttaatgttttgctttgaaggaaacatttttgttcatatattttgtttacatattcaactattttgaaatagaattcctgtgataatacatatatgacttatgtttacatataattgaatctgtatctggactttctaattggttccatatatatgtctattctagtacaggcatacctcaaggtgtatcgtgttttacagatattgcatttttaaaaaaataaagatttatggcaaccgggcattgagcaagtctatcagcaccatttttccaacatgttcttattttgtgtcacattttggtaattctcctaatatgtcaaatttttcattattattatatctgttatggccatctgtgatcagtgagctttgatgttactgttgtaattgttttggaatgccacaagccacaatcatataaaacagtgaacttaatgcataagtgtagtatgtgttctgactgctccaccgaccagccattcccctgtctcatcttctccttgggcctccctatttcctgagacacaacaatattgaaattaggccaattagtaacccttcaatggcctctaagagttcaaattcaagaagagtcacatgtctctcactttaaataaaaagctaacaatgattaaggttagtgaagaagacatgtcaaaaagctaggcctcttgtgccaaacagctaccaagctgtgaatgcaaaggaaaagttcttgaaggaaattaaaagtgctactccagtgaacacacaaatgataagaaagggaaacagtcttattgctgatatggagaaagtttcagtggtctggatagaagatcacaccagccacaacattcacacaagccaaatcctaatccagagcaagactctaattctctttaattcaatgaaggctgccagaggtgaagaagctgcagaagtttgaagctggctgtggttagttcataaggcttaaggaaagaaactatctccataacataaaagtgcaaggtgaagcatcaaatgctaatggagaagctgcaacaagttatccagaagatcccgctaagacaattgatgaaggtgactacactaaacaatagatttgcaatgtagatgaaacagcctcataccagaagatgtcatttaggactttcacagctagagaagagaagtcaatgcttggcttcaaactttaaaaggacagtccaactcttttgttaggggctagtgcagttgatgactttaagttgaagccaatgctcatttaccactccaaaaatcctagattccttaaaaatgatgctaaatcaacttttcctatgctctataaatgaaacaacaaatctggatgacagcatgtctgttggcagcatgtctgtttacagcataatttactgaatattttaagcccactattgagacctactattcacaagaaaagattcctttcaaaatattactattcattgacaaagccacagatcacccaagagctctgatagagctgtacgaagagattaacgttgttttcatgactgttaacacagcatgtattctccagcccatagatcaaggattaatttagagtctcaagtcttattatttaagaaatacattatataaggctatagctgtcatagaaagtgattcctctgatgaaactgagcaaagtaaattgaaaacctagacaagattttccattctagatgccattcagaacatttgtgattcatcagatgaagtcaacatcaatgagtctagatgaagttgactccaaccctcagggaggactttgataggtttgactttggtggaggaagtaactgcagatgtgacggataaatagcaagagaactggaagtggagcctgaatataggactgaattgctgtaatcccatgataaaacttgaatggatgaggagttgcttcttacaggcgaacaaagtggtttaagatgaaatacactcctggtgaagatgctgtgaacattgtagaaatgataacaaaggatttagaatattacataaacttcattgataaagcagtggcagggtttgagaggattgactccaattttgaaagaagttctagtgtgagtaaaatgctatcaaacagctttgcatgctacaaagaaatctttcatgaaaggaagactcaaataattcagcaaaactacattgttcccttattttaagaaactgcccactgattttgtatcctgagagtttgctgaaattgcttatcagcttaagaagcttttgggctgagatgatggggctttctagatacaggatcatgtgatctgcaaacaaatattgtttgacttcttctcttcctatttgaataccccttatttctttctcttgcctgattgccctggccaggacttccaatactatgttgaataggagtggtggagacagcatccttgtcatgtgctggttttcaaggggaatgcttccagcttttgcccattcagtatgatgttggctgtgggtttgtcatatatggctgttattatttgaggtatgttccttcaaaacctagtttattcagaatttttaccatgaagggatgttgaattttatcaatggccttttctgcaggcaaatcatgaatgaactgccacatcatgaatgaactgccattcacaactgctactaagagagcaaaatggctaggaatacagctaataagtgaggcaaaggacctctttaaggagaactacaaaccactgttcaaggaaatcagagatgacacaaacaaatggaaaaacattccatgctcacagataggaagaatcaatatcgtgaaaatggccatactgtccaaagtaatttatagacaatgctattcccattaaactaccattgacattcttcacagaattagaaaaaaactaatttaaaattcatatggaaccaaaaggagcccgaatagccaagacaatcccaagcaaaatgaaaaaagttggaggcatcacgctacctgacttcaaactatactcaaggctatagtaatgaaaaaagcatggaactggtgacaaaaacagacacatagaccaatggaacagaatagagaactcagaaataatatcacacatctacaacaatctgatcttcgacaaacctgacaaaaacaagcaatggagagaggattctctattttaaaaatggtgctgggagaactgactagccatatgcaggaaattgaaactggaccccttccctacaccttatacaaaaattaactaaagatggattcatgatttcaatataaaatgtaaaactataaaaaccctagaagaaaatctaggcaataccattcaggacataggcatgggcaaagacttcatgctgaaaatgccagaagtgattgcaacaaaaacaaaaattgacaaatgggatctaattaaattaaaaagcttctacacagcaaaagaaactatcaacagagtgaacagacaacctacagagtgggataaaatttttgcaatctatccatctgacaaaagtctaatatccagaatctataaggaagttaaatatataagaaaaaagcaattccattaagaagcgggcaaaggacataaacagacgcttctcaaaaaaagacattcattgtccaacgaacatgaaaaaaagctcaacaacactgatcattagagaatttcaaatcaaaaccacaatgagatcacctcatgcagtcagaatgatgattattaaaaagtcaagaaacaacagatgctggcttgttgcagaaaaaaaaaggaatgctttcatactgttggtgggagtgtaaattagttcaaccattgtggaagatggtgtggtgattcctcaaagatctagaaggagaaaaagcatttgacccagcaatcccattattgggtatatacccaaagtattataaatcattctattataaagatacatgcacatataagttcattacagcactgttcacaatagcaaagacatggggtcaacccaaatggccaccaatgatagactggataaagaaaatgtggtacatatacaccatggaatactatgcagccataaaagggaatgagatcatgtcctttgcagggacatggatggagctggaagccattttcctcagcaaactaatgcaggaacagacaaccaaataccacatgttctcacttataagtgggagctgaacaatgagaacacatggacacatggggggaaaaacacacactggggcctgtcagggaggcagggagaggagaccgtcagaaagaatagctaatagatgctaggcttaatacctaggtgataggctgatctgtgcagcaaaccaccatggcacacgtttacctaacaaacttgcacatcctgcacatgtaccctggaacttaaaagttgaaagaaaaaaaaaaaactgtcacagtcacctaagctccagcaaccattactctgatcagtcagtggccattcaaatcaaggcaagaccctccaccagcaaaaaattatgactcactgaaggctcatatgatcgttggcatgttttagtaataaagtatttttaattaggtatgtactcttttttagacataatgctattgcacacttcataaactacagtatagtgtaaacattactttaatatgcattgggaaaccaaaaaaatcatgtgactggctttgctgtaatagtcactgtattgtggtggttgaaaccaaactcacaacatttgtgaagtatgtctgtaccagaattacactgtcttgattagtggagcgtttaaattgattttactatctggtaggataaatctttcatcatgttaatctttcccaaggcattaattattaacttcatgtttatttttcaaaaagaaaaaatttgaaacattttgttaagttttcctcaaatcattccttctcatttgttccctatcagtaatcaatacttccatatatccaggcactaaaagaacctgggatatggttcacttttcattctttctctgtcattcccaataaatcctcaagtcctatactttgccattgaattatacctcaaacacatttatttctctccaccccagctaccgcatgctagtccagaccaccattatatttcacctgaactgctggaacaacttccaaagtatcttctttgtctccagtcctgcctctcttctaatcaattcattttcaaaactagcttgaagcttctaagagtaagtaaggtcaaagcaaactcatttattttcatcataactttatttgatgagagaatcataaaatgctagtcatagaacacgttgattctttttaaacatttaacacggtctctcataatatctcagaatttccttgctgaatgatttcattaaatacattaatgatctaaatagtaaattcatttaattaacaagataggaaagaagaaacaaagttccttgagtaataagtttaaacgtaatcccattagttgataagataaatgggattaatttctaaagacatacttatctagcacctagcaaaattccatgttcatagtaggactctatgaatatatgatgaaaaaataaatgcataaattaccatatcagttagaatttcatggcttgcaacctctgctagaattaaagcaccataggggcaagaaccatgataatcttcatatagtacgtatttaataaacatttgtcaaagtctgaaacaatgtcatccaaaaacaatcacagattcaaactatcacaaatccaaaactaccacaaattccccactgtgggaagaattacaacttatatttatgcagtgttttatcatctgcaaagtgaatactattttatttgcccagatgattctcatttagccctcacaacaatccagccaatgctactatcaccgccatccagaaactaggactgaaattattaagtgacttgtccaatattaagcatcttgttaatggaaatgttagggatccaaccttggtcttctggcaccagatctagtgttcatgtgattgtgtcaaagataaaaatgactatgaccagatatttattgccagaactaagggaaagaggacactctgcacatcgttaggtagtatctagctctgccaattttcaagcctttgtatgtccccttccctgcactgggaaacgttgacctcaatacacagattaactgccaacatatccttgatggttaatcctggtaataggcaagagggattaaaaggactgcaatgcaacaatttctgactccttcaagactcaattttctccagtctagcaatattgggctcaaaatagattagtagtttttgcttttttcttgacatttggcctctatcatttaaaaaaaaaaaaacttttaaatatgcaacttttgtgggtgtatagcaggtatatgtatttatgtggtacatttgatattttgataaaggcaagcaatatgtaataattacatcatggaaaatggggtatccatcccttcaagcatttatccttgtgttacgtaagtccaattatacccttttagttatcttaaaatatacaattaaattgttattgactatagcgcccctgttgtgatatcaaatactccattttatttattctttctaactatgttttgaaccaataaccatccacaactcccaccctcagacccccactattcttcccagcctctggaaaccatcatcctactttatgtctccatgagtacaattattttgacatttagattccacaaataagtgagaacatgtgatatttgtctttccatgcctggtttatttcacttaacgtaatgacctccagttctatccatgttgttgcaaataaaaggatctctcttttacggttgaataggtactctgctgtgtataagtaccacagtttctgtatccattcttctcttgatggacacttagattgcttccaaatttttctattgtaaacagtgctgcaacaaatatgggagtagagccatctcttccatatagtgttttcctttgggggtggggggtgtatataaccagcaatgggattgctgaattacatgatagctccctttttagttttttgaggaacctccaaactgttctcctcacattcccaccaacagtgtaccatggttcccttttctccacatcctcaccagcatttgttattgcctgtcttttggataaaagtcatttaactggggtgaaatgatatctcattgtagttttgatttgcatgtctctgacgatcagtgatgctgagcaccttttcatatgcctgtttgccatttgtatgtcttcttttaagaaatgtctattcaaatctgttgcccattttctaagtgggttattcgattttttcctatagagttgtttggactgcttttatattctagttatcacctgtcagattattagtttgcattttctcccattttgtgggttgcttcttcactgtgttgtttcccttgctgtgcagaagcttttgaacttgatgtgctcccatttgtccatttttgttgtgtttgcctgtgcttgaggggtattactcaaaaactttttgcccagaccaaatgccctggagagtttccccaaacttttcttatggcagtttcatagtttgacatcttggatttaagtctttaatctattttcatttgatatttgtatatggggagagataaggttctagtttcattattccgcatataggtatcaagttttgccagcacagaatactatgcacccataaaaaggaacaagatcatgtcctttgccgggacatagatgaagctggaagccattatcctcagcaaactaacacaggaagagaaaaccaaacacctcatgttgtcactcataagtgggagctaaaaaatgagaacacatggacccagggaggggaacaacacacccaggaccctgtcagggaggcagggggagggaaagcaacaggataaatagctaatgcatgtggggcttaacacctaggtgatgggtggataggtgcagcaaaccaccatggcacatatttacctatgtaacaaacctgcatgttctccatgtgtatcctggaatttaaaataaaattaatttaaaaaaaaaagactgtttttttcccaatgtatgttcttggcacctttgtaaaaaatgagttcactgtagatgtgtggatttgtttctgtgttctctattctattccattggtcaatatgcctgttcttatgcagtactatgctgttttggttaccatagctctgtagtataatttgaatccaggtaacgtgattcctccagtgtggttcttttcttctcaggatagctttgtttcttctgggtcttttgtagttccatataaattttagaattgcattttctatttctgtgaaaaatatcattggtatttgagtagggattgcattaaatctgtacattgctttgggtagtatggatatttcaacaatactgattttaccaatctatatatatgaaatatcttttcattttcttgtatgatctttaatttcattcatcagtattttatagttttcattgtagagatctttcacttctttaggtaattcctagttatttaattttagttgtggctattgtaagtgcaataactcttttgatttctttttcaggttgttcactgttggcatatagaaatgctactgatttttgtatgttgattttgtatcctgacactactaaatttatcaattctcattctttttggtggagtctttaggtttttccaaatataagatcatgctaggtgtggtggctcacacctgtaatcccaacactttgggaggccaagatgggcggatcatctgaggtaaggagttcgagactagcctgaccaatgtggtgaaaccctgtctctagtaaaaatacaaaaaaaaaaaaaaaattagctgggtgtggtggtgggcgcctgtaatctcagctactcaagaggctgaggcaggagaatcgcttgaatatatatagccaacaagaatactttgacttctacctttccaatttggatgccctttatatctttctcttgttggattgctctatctaggacttccagtactatgctgactaacggtggcaaaagtgataatccttgttgtgttccagatcttggaggaaaggctttcagtttttccccagtcagtatgatactagctgtgggtctgtcatatatagctcttattatgttaagatatgttccttctatactcagttttttgaaggttttctgtgatgaaaggatgttgaatttcatcaaatgctttttcagcatcaattgaaatgatcatatggtttttatcctttattctgttgatatgatgtattatattggttgatttgcatatgttgaaccatccttgcctcctagggataaatcccacttggtcatgataaaacatctttttaatatattgttgaattcagtttgctaacattttgttgaggatttttgcattaatattagtcagagatactgaccagtatttttttttatgggtctttgtctggttttggtatcagggtaatgctggtcttgtagaatgagtttggaagtattctctcctcctctactttttggaatagtttcagtaggattagtattagttctttaaatgtttggtagaattcagcagtgaagccatcaggtcctaggcttttatttgctgggagactttttattacaccttcaatctcattacttgttattagtctgttcaggttttgaatttctttatggctcaattttgataggttgtctgtgtctagtaatttatccatttcttctgggttttccaatttatcggcctatagttactcatagaacccattaatgatcctctgaatttctgctttataggttgtaatgtctcctttttcatctctgaatttatttggatcttctctctttttttcttagtctagataaaggtctgtcaatctgagtctggctaaaggtttgccaatgtttatcttttcaaaaaaacaactttttgttttactgatatcttgtatggatttcttcatctcaatttcatttatctctgctttgatttttaatatttcttttctactaattttaaatttggtttgctctagcttttctaattctttaagatgcaccaattggttgtttatttgaagtgtttcttccttttgatgtagacacttataggataaactttcctcttagtactgctttcactatatcctatacattttggtatgttgtgtttccattatggtttgttttgagaaatttttcaatttccttcttaatttcttcattgacccctggtcatttcagggcatattgtttaattttcatgtgtctgtatagtttccaaaattcctcttgttattgattatatttattccattttggccagagaaaatgcttaatattatctaaatttggttgaatgttttcaaatttgttttgtgagctaacatatggcctatccttgagaatgatccatgtgctaaggaacagaatgtgtattcttcagtcactgagtgagatgttttgtaagtatctattaagtgaatttgatgtatagtatagattaagttcaatgtttctttgtagattttctgtttgaagatctgtccaatcctgaaagtgggatgttgaagacctagctattattgtattaaggcctatctgtctctttagctctaataatgtttccattatatatgtgggtgccccatggttgggtgcacacatatttataagtgttatatcctcttgctgaattgacccttttatcattatataacgaccttctttgtctgacttgtcttatagtttttgtcttgaaatctactttgtctgatataaatatagctattcctattcttttttggtttccagtggcttggaatatctttttccatccttttattttcagtctatttgtatctttatagatgatgtgtgtttcttgcaggcacagatcattggctcttgttttttcacctattcggccactctatttgaagtcagtcttctcattcagactctcattcagtattctcttccctctttccttctgtcttttctcccttttagtgaaagtgattttctctggtgctatgatttaatttcttcctttttattttttgtatatccattgtatgtattttgatttgaggttaccatgagccttgcaaataccatctaataatccattattttaactggtgacaatttaacaatgattgcttaaacaaacatgcaaaaagtaaactaatgaaggctctacactttaactttgtctgcctgctttttaacttcttgttgcttctctttatgtattattgtattgtgtatgtcttcaaacgttgttgtagttgttatttttgattggctcattgtataatctttctacttaagatatgagtagtttacatgccacaattacagtgctataatattctctgtttttttctgtgtgcttattattgccagtaacttttgtacctatagatgatttcttcttgctcattaacatgctcttctttcagatttaagaactccctttaacatttcttgtaggacaggtctgttgttgatgaaatcccttagctttggtttgtctgggaagatctttatttatctttcatgcttaaagcatattttcaccagatatactattcctgggtaaaagtttttttccttcagccgtttaaatatgtcatgccattctctcctggcctgccaggtttctactaaaaagtctgctgccaaacatattggagctgttatttgttatttgtttcttttcttttgctacttttaggatccttcctttatccttgacctttgggactttgattattaaataccttgaagtaatcttctttggtttaaatctgcttgcattctataatcttcttgtacttgaatgttgatatctttctctagatttgggaagttctccagtattatccctttgaataaactttctacccccacctcctctttaaggccaataactcttagatttgaccttttgaggctattttccagagcctgtagttgcgctttattgttttttgttgttttttcttttgcttcctctgactgtgttttttgttttgtttagttttttgttttcttgagatggagtttcgctcttgttgcccaggctgaagtgcaatggcatgatctcagctcactgcaaccttcacttccttggttcaaacgattctcctgcttcagcctttaagtagctgggattacaggtgcccaccaccatgcccagctaattttgtatttttagtagaaatggggtttctccatgttggtcaggctggtctcgaactcccaacctcaggtgatctgcctgcctcagcctcccaaagtgctgggattacagacatgagccactgttcctggtctgactgtgtatttttaaacagcctgtcttgaagctcactttcttctgctgcttgatcaattctaccattaaaagactctgatgcattcttcagtgtgttgattgcgttttttcagctccagaatttctacttgattctttttaattatttcattctctttgttaaatttatgtaatagaattctgaattccttctgtatcttatcttgaatttcttttgagtttcctcaacacagctattttgaattatctgtctgaatggtcatgtacctctgtttctccaggattagtccttagtgccttactgagtttatttggtgaggtcatattttccaggatggtcttgatgcttgtagatgttcatcaatgtctggacactgaagagttaggcctttattgtagtcttcgcagtacaggcttgtttgtgcctgtccttcttggcaaggctttccagatactcaaagggacctaggttctaagccccctaatgctgtggtttttgcagactcatagaagtatcattttggtgatcttggataagatctgaaatgattctcttgattaccaggcagagactcttgttctctttccttactttctcctaaacaaatagagtcagtgtctctctctcaatctctcgctctctctctctctctgctgagccacctggaacttggggtatggtgatgcaagcacccctgtggccacagccattgaaactgtgctctgtcagacttgaagccagcacagcactgggtcttgccccacacacactgtaaacactttctggctaccacctctgttgactcaaggcactagggctcagtgatcagcaggtagcaaagccagccaggtctgtgtccttccctttagggcgggaagttcccctaggtcctgggtgggtccagaaatgctgtttgagaagcagagattggagtcgaaaaccttttaagtttacctgatgttctattctactgcaggtaagctggctctcaaaccacaatacaaagtccttcctagtcttctccttactgtttttctaatgcctgattatggatcctagacttgtttttgtacttgaatttttacaatagtagcaggcctaggactgtgttctctgccttggtctttgacagttctcttccaagagattgatgtccagtccctgaatcccaaacaggtcctttaggccctgtgccacctaaatttacagctccaatgggaatgaatagctttgatgctttgccttacttagattcctttatcctacctgctactgtcaattgtgcaatgtgcagaccaaatagtactgcttcaaagtgactaatcatgcatactgacagcacttaataagtaaagagaacattatgccccccaagaaaaataaatattggcaataagaaatctatataataagcgttcatacgttgtttacactgtgttttctataacatttaaaactatcagtggtgggcagaatataacaagtcaaactttattagtgactcagtaaaaggttctatgcttcagtagagaaaagagttataaaaaattcatcatggagctatgtggattagcaatactatgaaaaaaatattaggagttacagctgacagtatgagtcagactgtaacatgccagttaaagaaattaatgtgacattagctgatttaatacaagtatgatatttcacctagaaagagtgacaggcctccactcttcagtgctaattagtattgggaatgatctggcttcacaatttcataaaaggcgggctaactggattgtgctgaatttcctttagtaaggctgtgcaaggtcttattcatcaaagagactgggggagacttggccttctgacttacgaaagatcttagcaacaatcaggaacccagaggtagacacagtagttgcccaaaagtaccaataatgtagtttttcaaatcagaaattaggtggcctagaggcttttctagactactttgatagggcatctcactgaatttgcttcctagcacagctctattcttagccacatgggaaaactaaagcatcttaattgacactacaggggaatcacacatgatgcacttggcttggtgctggggctgacacttgaggagaggcaaagaccaaatggaccgttttctgtgaacataagtgaggaaaatggtgagtattaaacccctgtcatgtgagaaaagattaaataagaaaaggtgctgaggaacgtgtatgacaaacatttaaaaggtaaaatagtgattagaattgttatctatctctaaggaagtagaaataatgcagatggggagatggtaacagggacagatattgcagctgatgataagatttctaataattagagctttgcagtataaaactggctgcttactaagtagcaaactctctgtccctggagtcttcaaggctagcctgatctatacaaggcatcttcttttttttttttttttttttgagacggagtctcactctgttgcccaggctggagtgcaggggcgcgatcttggctcactgcaagctccgcctcctgggtttacacaattctcctgcctcagcctcccaatagctgggaccacaggcgcccgccaccacgcccggctaattttttgtatttttagtaaagacagggtctcaccctgttagccaggatggtctcaatctcctaaccttgtgatccacctgcctcagcctcccaaagtgctgggactacaggcgtgagccaccacacccagcctatacaaggtatcttctgagtgtagaagatagcagtttgaattagacgagttttaagatgctaagtaaatgagagaatcagaatagaagttttgtattagtactatggtacaagttacctgaatatattcactgcttcctgaattttttctgataatgggggaagtaacactaatacaagagtgtgggtttatggcttttttaaagttagaaatgactcacagttccaaatgactcaaggtaggtgaaagtttttggaagtggtctgactactctgacatcttcccacaatatcaagaaaaagtatcccctgaagatttacaatgacattcaaataagaaaaactacaacatgaatatgaaatcagaagaaaaataacttttttttaaaacgaagatactttaggtgggagcaaagaatgaatgacagaaaggcagccatgggggaaggagcatcacgtaacagtggtaggcagaataatggctctgaaagatgtccatgtctgaatccctggaaactaggaatacattacgtaacacatagcaaaaggaactttgcagatgtaagtcaaggatcttgctatgaggagatcatactgcattatccaggtggcccactatactcagaaaggacattataagtagaagagggagaaaggagagccagtgtcagtgatgcaacacgaggtatctgactggctgtcactggttttggagcttgaagttagccatatgtattagtctgttttcatgccgctcataaagacatacccaagactgggtaatttataaagaaaaagaagtttaatggactcacagtcccatgttgctggggaggcctcacaatcatggcagaagagcaagggacgtcttacatggcagcaggcaagagagaacgagagccaagcaaaaggggaaaccccttataaaaccatcagatctcatgagatttattccctaccatgagaacagtattggggaactgcccccataattcaattatctcccacaggatccctcccacagcataggaatcacgggaattctgggagctacagtccaagatgagatttgggtggggacacagccaaatcatatcaccatgaatcaaggactgtgagcagctcatagaagctggaaaaggcaggaaaacagattcttccctagagcctccagaaaggaaagcagccctttctatattttcgactggtagggcccattctggacctccagaactgaagaataatacatttgtgttgtttttttatgccactaaatgtgtggtaatttgttacagcagcgttaggaaacaaatgcaataatataccagcagaaggcatcacacagggaggcatgggctaagagaaggacataaaattggacaccagtgggaaaatacaccttatcattttgtactgactcagtattttaaagatggtgattctttctcgtttttaaatgtaatacaataccattgcaatacagtttccctccaactccaacttagttcttgacaagtaagcctaaagtgcatttggaaaaataaatgtgtgacaatagacaggttatcaatttgaaaagagaaaggtaatggagggagtggagatcaacctttatcagatatttatgtaaactacaaatggttctggtacaataattgaaaggcaagataacagaaaaaatactttaaaagaaggttctgatgcttgcagaaacttattacattataaaggtggtatttcaaatcagtaagaaaaccacgggttatataataattgtcagtgaggtaaccaactagtcatttagagagaaataataaacttgaattactactgcattccttatatcaaattaattcctgataaagatttaaacaattagcaaatatatttgttataataatcttgaaataagaataacttttgaccagaagctacaaccagacacataaccaaggttgtacagaaaaagattgataaatttgaatatatactactattaaatttgtataaagaaactaaaatatcataaagatcaagagacaaaaaatttgggaaaattctttgacaaatataacaaagggttaatctctttaatatatataaagataataataaattgagatgaaagagaccatcaacctaagagaaaaaaatgagcaaagattacaggcagttgtaaaaatagctagaaatttcttacatgaaaagatgctcaacttcatttataattaaatatatgtacatgaaagcaagataacacaccattcttgatcaaattgctgtagataatacacagtgttagtgagggtttgaaaaaaatgggcactttatataaaagttaaaagactaaccatctgttagtcaaagtgtgaattgatgtaaacctctttctggctaatttgtcatttgttacaggagatcgttagaaagcagatctttagacagcatggactttagaacttttgccatgttaaaatttttccctcacctcggaacaggtgggattgataaactaccattactatttctaaaacatggtactgtaaagcaccatttacaggcattgcataattattactctatctaaaaaatgctaaatgctggatatgctgtatgtttctattaaataataaaatgggagtgtgggtggagggaagcctgcctcttggtgtcatgcatgagaaaaactaatcagatctcaccaatatcaatcgtctgagctgtgaatgggtgtcgggatagcatccctctttagaagttactgatgaaaccccatgaagcttgattcttagataagccttgcttggtcagccacttcaaaattggaggtaccaatttaacatttgaaaacaaaaaatctcaacaacaaagttctgagaaaccagtgtgggtactacctaagaatgttactttgggtatgatatgggttaaactatgtcctcccaaaattcacgtgtcaaagtcctaaccccagtacataagaatgtgacattatttagaaatagggtcactgcagatgcaattagttaaatggagatgaggttattagggtggaccccaatccaatgacaagtgtcgttataaaaagaagaaatctggagacagacttgtacacaggtataacatcatatgaagattggagttatgctgccacaagccaagaaatgctaaacattgtcagaaaaccaacaggaatggaacaaattctctctcacagacctcagaaggaaccagtcctgctgacaccttaattttgaacttctagcctttagaactgtgagacaataaatttctgttaaggtatgcagtttgtagtactttcttatggaaaccctagcaagccaatatagagttaaaaaaaacagtaaaaggtactcgttgaaaaacttttgattaatctcttagcattttaacatatttactccttgggaaaaaaataacaattagggactatcaaaaaaggggattatctttcttcttgataaaattcccaaaagtgtaataggtatcaaaattttaaaatcacgtaccctttaataaaataaataagtattgttgctgtaaacaggcaatatagtacaatatagaggtctacagactttagactgcacaaagtccacctggatcacttgttagtaatccggatttgtggctctccccggaattcttactaaatcggaatctctggtggtagccatggagagttatatcttacaattatcccaggtcatgttgatgcaaattgttggtgaaatatacttggaaaatacaggaagagtagttcaagagcatgagccctttaactggagtcagaatcccaactctgccttttttaacaaagttgccttggcaaagtcttacagtttcctcatctgcaaaattagaatagtaatagtatctgcttcaaggttttgttggtagttgtgaatgaaataataaaatcaataaataactttgattaaaatgtatcaaaccaccaatgacattcttaacataatgagaaaaaaactattttaaaattcatatgggaccaaaaaaaaaaaaatggcccaaatagccaaggcaattctaagcataaagaacaaagttggaagcatcacattacctgacttcaagctatatactacaaggctacagtaaccaaaacagcatggtactggtgctacagtagacacatagacaagcagaacagagtagagagctcagaaataaagccacatgtctacaaccatttgatcttcgccaaacctgacaaaaacaagcaacgggaaaagtactccctattcaataaatggtgctgggataactggctagccatatgcagaaaattgaaactggaccccttccttacaccatatacaaaaaatcaactcaagaaggattaaagacttaaatataaaacctaaatccataaaaaccctggaagaaaacctaggaaataccactctggacatagaactagacaaagatttcctgatgaagatgccaaaaacaattgcaacaaaaccaaaaattgacaaacgggacctaattaaactaaagagcttctgcacagccaaaaaacagaacaaaaacaaaaacaaaaaaaaaaacaaaaaaaaaaccatcaacagagtaaacagacaacctacagaatgggagaaaatatttgcaaagtatgcatctgacaaaggtctaatcccaaatctataaaaaacttttaaaaaattacaagcaaaaaaaccaaacaaccccattaaaaatgaggaacataacatgaataaaatgattcatttcaaaaagatgattcatttcataaagcacttagtctagtgtctaaaagcctaagtgatcaatcaatgtagccattattactactcagtaatttttaaaatgagataaatgtgcaagtactgatatgttaagctaaaacaataaacaaagggaagaataatatgtgatgtatgttcatatctgtgtgaaaaaagtatgcactcaaattatatattcctggaatatttctagaagatattattagaaacatttggtgtttaacactgggaaatgagatcatattctcttttgctttgcttgatttaaaaaaattatatgtacatgtgattttcagggaaaaaatatagtttgtgaatctaccacctgaggaaagagatgataccatttcaaatacaaatgagctttgatttttatttctggcactactgtgtagaaatttgcataccccaggtgaaattggaaatggtgaaatcccaagaataatctctgtaatgaatcatacaaatgcaactgaaaacatgccaaatgtcaggtaaaactaaataggaaccacctttgtacaaatcctcaaaaaaagacctagatgatctagatcagaagtcaacaagaagtcaaaagaagtggaatgtagttcaccaataagaagatgacaaagaggagaatgttcacctagactcgaacccttgaaccatttatctttctcttgttctatcatgcttactgtttctgtaaagaagccatcaacaagttgggcgtattagctcacacctgtaatcccagcactttgggaggctgagatgggccgatcagctgaggtctggagttcaagaccagcctggccaacatggtgaaatgctgtctctactaaaaatacaaaaatgagcagggcatggtggcgtgtgcctgtaataccagctacttgggaggctgagggaggagaatcacttgaacctgggaggcagaggttgcagtgagcaaagattgcaccactgcacaccagcctggtgacacagcaagactctgtttccaggaaaaaaataaaagaagaagtagtcatcaacttctgtaagcttttcacttcctaattacccttaaatccacactatttttctacgtccataatcactaagctagttcaagcttcatcagctcatacctatgttacatatttaaataatctccaaactcccatctaatttagctccattttaaccaggagttcccatcattctgaatactaaaacatttttttcgaagtaaaaatttttacagattctctaagtgataatattaggattaatttaggaatgtagacagtataataaatgactttcttatttactctctaaattatagataagagtccagggttcaagaaaccaaccagagattttaaacatttaggctttgcaggccacatggtctctgttgtaactactcagtattggtgttgtagcacagaagcagccacgtacaatatgtaaatagaaaagcttgtccagatttggcctgcagtgagtcagaactgtcctagtgaccacagattgccagactgtggcaaagaggtcatgcaaaagagtttaaaacatcagtaaggctagtgatgaagcagatactggtttaggcccttggcagtgtaggcttcctactcctacactctagaactacatagactggcatcaggtctcccaagcgagttctttattgctaggcttaccttacatactttctgcaggtgagaagatcacaaagagaataagtgacacaagctcagtttctgctcccaagtttaggagtcagttaacttccctgagaaaagaacaggaacagagagaagcccagtcacacttatccataactctccacgtgaaaatacaaagtcaggggaaagaatctcactttccttgcccaactgcaacaggtaagttgtaccactgtattaaaaaaatcagcaaaaagcaaaagtgattttccatttttattaatcacaacaaaacttatgcaaattttaaaataataaatatggacatggatatgtaaaacctaccatttatttaatctacagacagaggttagtatctgtatggattttcaagcccttttcagcaaccccatagtggcccacttgagatccacagcttcataccacttctaaaaggtagggactattataaccctcacagtatagtactgtcagaggacaatcatgatcatccaataaatatttgttgaataaaaatatgaattttatactaatttattctttaaagctttcaaagcctctccaaggataccttttaatacaaaccctctcttcccatatgcctgatatactcagtagcctccatcctgaatgacatattcctgcctctgtcttcttgcttatgttctccttattccctctgagtagcagggccctcccaggcctatagaaattctccctttccttcataggcaatcataaattctacttagtccagtaagaattttgtggctacacttgactacatagcttgctttcttctctgaacctaaaaacaacagtaatattctgtttgatattaaatcagtatctcatgacacattagcttttcaggactgcatttataatcaatatttttattgttagctacttttgttgttgttgtagtatacatttttatttttactttttatttcaatagctttaggaatacaagtgttttttggttacatggataaattataggaacctcccaactctccccccttctgagtctccagtgtcaactacaccacacagtacacctttgtgtacctataacttagcttccaattataagtaggaatatgtggtatttggttttctatttccaagttacttcacttaggataatggcttccagttccatacaaggtgctgcaaaagacataatttcattctttcttatggctgagtagcattccatggtatatataccacattttctttatccggtcatcagttgatgggcactgagattgattccgtatctttgcaattgtgaattgtgttgcaattaacatatgagtacaattgtctttctaataacttccttttctttgaggaaatacccagtagttggattgttcaatagatggtagatgtgcttttagttctctgaaaagttgccacactgttttccatagaggttttactaattcacattcccaccaacagtttataagcattctcttttctccgcatctgaaccaacatctattgttttttgactttttgaaaatggccattctgactagggtgatcttgtagctcactgtggttttaatttgcatttctctgatgattagtgatatcgagcatgtgtttgttggccatttgtatgtcttcttttgaaaaatatctgttcatattgcttgtctactttgtaacgggattgtttttttttttcttgctgatttgtttgagttccttatagattctgcatattagtgctttgtcagatatacagtttgtggatattttctcccattctgtaggttgtctgtttactttgtggattatttcttttgcagtgcagaagctttttcatttaattcaatcacatttatttttgttttgttggatttgcttttggggtctgtgccctaaattatttgccgaaggcaatatccagaagagttttcctaagttttcttctacaatttttatggtttcaggtcttacatttaaggtttttttgttgttgttgttgtttgcttgtttgtttgtttttgagacggagtctcgctctgtcgccaggctggagtgcagtggcccgatctcggctccctgcaagctccgcctcccaggttcacgccattctcctgcctcagcctcccgaatagctgggactacaggcgcctgccacccaacctggctaattttttgcatttttagtacagacggggtttcatcgtgttagccaggatggtctcaatctcctgacctcgtgagccacccacctcggcctcccaaagtgctgggattacaggcgtgagccaccacgcctggtcacatttaagtttttaattaatcttgagttaatttttatacatggtgagagataggaatccagttttcattcttctatacgtggctattccattttctcagcaccatttattaaataggatgtcctttccccagtgcatgtttttgtctgcttagtcaaagatcagttggttgtaggtattttgctttgtttctgggttctcaattctgttacatttgtctctgtgcctattttataccagtaccatgttattttggttactattatagccctgtagtataacatgaagtcaggtcatgtgatgcatctagatttgttctttttccttaggactgcttttgctagttaggcttttttggttggttccttgtgaatttttggattgtttcttctaattctgtgaagaatgacattggtattttgataggaattgtattgaatctgtagattgctttgagcagtatggtcattttcacaatattgattcttccaatccataagaataggatgtttttccatttgtttgtgtcatctatgacttctttcattggtgttttgtagttctccttggagagacctttcacatccttggttaagtgtattaggtattttattaatattatattattttgcagctattgtaaatgggattgagttcttcatttcattttcagcttggtcattgttggtgtatagcagtgctactgattagtgtttatgttgattttgtaatctgagactttagtgaattcatctatcagatctaggagtcttttggaggagtctttggggttttcaaggtataagatcatatcatcagcaaaagaagatagtttggcttcctcttttccaatttggatgttctttctttctcttgcctgattgctctggctaagacttccagtactgtgctgaatagaagtgatgaaagtgggcatccttgtcttgttccagccttcagggagaatgctttcaacttttccccattcagtatgatgttggctgtgggtttatcatatatggctcttatcattttgaggtattttagctactttttagattctaccctcccagtgagctagtgctccatttggtgtttcatttgtgtgtgtgtgcacgcttctattttatgcttcacagaaatccatacaattcctacacagagtagactttcaaaatattgaattatttatgttaaatgactcaattaattaacaaaagaatggataaataaataacataaatgaccaatattaataaaaattaagtcttaaaaatatggagaaaaacttgaatggcctcccaaaaccttccaatccctgtgctattttaacagaaacattaattatttttaaaaaaccctctttgtagtcatttacttcacagagacaagaaatatggtaacataaaggtaaataatataaatctgtgacttgaatccttgaaaaatctggaacaacaaaaatattgacaaataatatcattgtttaaaatactgaagaagaatatattgcaatgacaatatgaaaatatgttttggtatctccagtctcagtcttgttagaagtatgttcagaagtgaacaactgaatgagaagtgaagtgctcataggggaaggataagtccagaaatctgaatttagtcccacatagcaatgaatgtttctcaattatacaaattacagtcaccacttcagtgataatcatgtcatttgccatttattgttttcactcatcaagggataaagaaaaataaaagatgaaagttacttgaaaaataatgatgaatccatatgctgagagaaaagcattgtgttctaaatgacaaccaacacctgaacccaggactcacttatttggttaattaatatacattcgaggctgtgaaattgtcatttctacacataataattaaacaccattaatggaaacacctaaaataactacatttgctttctcagagaattacacattaggaaagtaagttaatgtgataaacattttacaatatatttagacttttaggaaactttttttttcttttttcttttctttttttttttttttttgagatggagtctcactctctcacccaggctggggtgcagtggcattatttcggctcactgcaagctccacctcccgggtttaccccattctcctgcctcagcctcccgagtagctgggactacaggcacctgccaccacacccggctgattttttctatttttagtagagacggggtttcaccatgttagccaggatggtctcgatctcctgacctcgtgatctgaccacctcggcctcccaaagtgctgggattacaggcatgagccaccgcgcccggccctttttaaaaaattaacgtgatttaggaggccacttgaagatattcagcttttgatggcataaaattctggctttaataaccaaccactagttatttaatatgattgtgtacctgcaaaaagcttaagaaacttttagctaaatgaaggaattctttaagaagacaaaataagaattagtcacatatctgcttttccactattcttgttaccattactctaccagcatccctgcaaagcagatcagcaatatttgtgtgttttgaaactcctctggtttcctggcttctaagatccagtccatcaccaagtcccatgattggtccactcttgttgtcccacgtccatgttaaactaggtttcagcatcacacatgcagattaatgtcactgtctctgaactcatctcccttcttggacagcttcacttcatcctatataccaccattagaagaatctttgaacacaattattctcaaattattcctagcccaaaaactcaaatactttctaaataaattttattcaaatcaaaactctctagcatagcgctgtatatcccaacatgccaatttcaccttctttatttcattttccattcaactgtatgccaaggctctactttgagctcatctgcttgttagatcagcttaacactgaatttgaacatgccttacctcacaattctacttcttcaagttcttcacctattttaaaagccagtgaagaagcacttacagaggtagaataagaatctccagaactccactccttcataaaaggcacaggaacactcaaaaagttgtcaaaataaactttagcacttaaccaaaggtttgcaataatccatcaaggatttattcaagaaaatcatcagaatttttgtgaaaacagttaacattgtgtatttaaatttgctctaatcccatttccatctccccagctccacaacagtctcacaatcactcttaaaaccaacatatactagagggcgttaaatgggtttggagctctacaaactgtcttgcactcacagagaattcatatttgatgtatgcagcagctccctggaaaagctccatttataggacatgtctttatttgacctgatacagaactcactcagtgggaaaggctctgttcttaagatgttagtcaaaatcaatcctgacccatagaatgtacatcaagaatgaaccctaatgcaaactatgaactgagggtgatgatgatgtgtcaatgtaggttcatcaattgtaacaaatgtagcactctggtggggatgttgataatgggggaagctacacatatgtatgggggcaagggagatatgggaaatctctgtactttcctcttaattttgctatgaacctaaaactgctctaaaaaattagtctttattataaacaaaactatgtatttttctacaatcaaatttcttcacagctatatgttcttagctcctttcatgcttttatgtgtttgtataccttttgtgttccagtggttgggaatagttttgtgaaaataaaaaatatttccataaagaaaaaaagctagaaaagttgttgctattagacctactctataagaaatatgaaatttttattttaatttaaattttgtgtaggtacacagtaggtgtatgtatttatagggtacatgggatgttttgatacaggcatgcaatatgaaataagcacattatgaagaacggggtatccaatccctcaagcatttacccattgagtttcaaacactccaatcacactctttatttttaaatgtagagttaagttataatttattatagtcaccctgttgtgctatcaaataggtcttactcattttttctaagtacttttgtacccattaaccctccccaccttaaccacaaaccccacactaccattcccagcctctggtaaccatcctccaactctctatctccatgagtttgttttgctttttagatcccacaaataaacaaaaacatttgaagtttgtctttctgtgcctggccaatttcacttaacataaagatctccagttccatccatgttgttgcaaatgacttgtctagatctcattatttttatggctggatagtactccattgcgtataagtaccacattttctttatccattcatctgttgatggacgctttggttgcttccaaatcttagctattgtaaacagtgctacaataaacataggagtgcagatatctcttcaacatactgatttccttttctttgggtatatatccagcagtgggatcgctggaccatatggtagttctatttttagttttttgaggaacctccatattatcctccataatggttgtactaatttacattcccactaacagtgtataaggttttcctttttctctacatcctcaccagcacttgttattgcctgtcttctgaattaagccattttaactgggtaagatgatagctcattgcagttttcatttatatttctccaatgatcaatgatgttgaacaccttttcatacgcctgttttccagttgtgtatgtcttcttgtgagaaatgtatattcaaatcttttgctcatcttttggcaaagttattttcctatagagttgttcgcacactctatatattctggttattaatcccttgtcaaatgagtagtttgcaaatattttcttccattctgtgggttgtcctttcactttattgattgtatcctctgctgtgcagaagctttttaacttgatgtaatcccatttttccatttttgctgtggttgtctgtgcttatggtatattgctcaagaaatttttgcccagaccaatgtcctggagaatttccccaaagttttcttatagtagtttcatggtttgagggatttgatttaagtcttaattcatttttatttgatttttgtaattaatgacaaataggggtcttgtttcattattctgcatatagatatccagttttcccagtaccatttattgaagagactgtcttttccccagtgtatgttcttggcacttttgtcaaaaatgagttcactctaggtgtgtttatttgtttctgtgttctctattcttttccattggtctatgtatatatttttatgacagtgtcatactgttttggttattgtagctttgtagtataatttgaagtcaggtaatgtgattcctccagttttgttctttttgcttaggatagctttggctattctggtttttttgtggttccatatacatttttggattatcttttcctatttctgtgaagaatgttattggtattttgatagggatttcattgaatctgtacatttctttgggtagtacaaacattttaataatattgagtcttccaatccatgaacacggaatgtctttccatttttctgtgtcctcttcaatttctgtgtcaatggtttatagttttcatcatagagatcattcacttcttttcttaattcatttgtttttaatcttatgtgtggctattgtaaatgggatatttttatttctttgtcacattgttcactattggcacacagaaatgctactgatttttgtatgttaattttgtatcctgctactttaccaaatttactagttctaatagttttcttgtggagcctttaggtttttctaaaatcatatcacctgcaaacaaggataatttgacttacacctttccaatatggaggccctttatatctttctgttgtctgattgctcttgctaggacttccagtactacgttgaataatagtggtgacagtgggcatccttgtcatgttccagattttagagaaaaggctttcagtttttctccattcaatgtgctactagctatgggtctttcatatatggctttaattatgttgaggtatgttccttctattctcagtttttgagggtattttatcacgaagagatgttgaattttatcaaatgctttttcagcatcaatcgaaatggtcatatggtttttatccttcattctgttgatatgatatatcacattgatttgtgtacgttgaatcatccttgcatcccagggataaatttcacttgatcatgatgaatgatagaaatactaaattattaaagggaggctttctggctgaaaagacagtaaacagtaatgcaaattcacactaaaaaacgtaaaaagtgtgggtaaaggtaaatataagatagtataaatgtacttttatttatactcttttcaccacccttatgccttaaaaaatcaactgcataaagcaataattacaaatctctgttgatgtgcttatatgaagatgtaatttgtacaaaagcaacaatacaaataagggaggaggaaatattggggcaaagtttttttgtatattattgaaacaaactgttgatattaattcaaaatagattattttaagttaaaaaatcaattataacctctagaataccaactaaaaaataactcttaaaaatatgtatgaaaaacataaaggaaattaaaagaataaactagaaaatatctatttaatacaaaggaaggcagtaatggaggtatagagggacaataatgatataagaaatattagaaacaaatagcaagatggcaggcataaatactaccttatcaacaattacattaaatgtaagtagattcaacactccaaacaaagagatgagcagaatggactcttctgtttttgtttgttttaggttttgcttttttgttttcttatagacagggccttgctgtgttgcccaggctggtttcaaattcctggcctcaagggatccttctgcctcactctgcctgccacaaaatgctgagattacagacaagccactgagccaagccagataaattttgttcaaaaaatgatccacatgttgtccataaaagatacacttaatattcaaagacattaataggttgaaagtaaaaatatgaaaaaaagatacatcatgcaaataacaaccaaaagataacttcagtgactatactaatattgaacaaatagactttgagacaaaacttgtcactagagacaaaaaaaaagacattttataaagataaaacagtcagtcaggaagacacaacaagcataaacatatatacacctaaaaatagggcctccaaaacatgaaacaaaaagtaacagaattgaagggagaaatagacaattaaaaaataatagttggagacttcaatatcacattttcaataatgaatagaacaattaggcagaacatcaaccagcaaacagaagacttaaataataccataagccaagtagacctaacagacatctatagactactctaccaaacaacagcagaatgtgcgttcttcttaagtacacgtgaaacatcctgcagaatagaccatgcaatatgagacttgccataaacaagtctcaatacattttaaatgttttatgtcatacaaggtatgttctctgaccataatagaaaaaaattagaaaacaataaaaatgaaaattgagaaattcatgaatatgtggaaatagtcaacatgctccttaattagcaatgtgccaaagaagaattctgaagggatattaaaaataatttcaaatgaatgaagacaaaaacacaacataccaaagcttatggaatgccgcagtgcttagagagaaatttatagctgtaagcctatttttaaaaagacataagtcaattataacctttagtattaagaaactagaaagaaatataaattgaaagcaagcagaaaagaggaaataataagagcaaaaataaatgcaaataaagaatagaaaaacaataaagaaattcaaagaaatgtaagttggttctttgaaaaaaaatacaattgacaaaatttcaggtagactgaacaaaaaaaaagagagagaagactcaaattactaaaatcaggaatgaaagagaagctatcactaccaactttacagaaataaaaaagtttataaggaatactatgaataactccatgccaacaaaacagataggctagctgaaataaacaaaatcctaccaaaactgacttaagaaaaaataaaaatatctgcgtagacctataacaagtaagagattgaatttgtaatttcaaaactttccatatattacggccaggctcagatggcttcaaaggtgaattaaaccaaacatttaaagaagacaataacaatccctcacaaatgcttctttaaaaaaaacaaacaaacaaaaaacacaaaaaaggaaacactttcaaattcattttaggaatcttgtattacactaatatcaaaaccatataaacacatcacaagaaaagtagacatcaacatcccttataaatgtagacacaacaaccttccacaaaatgctggcaaactaaatgcaacaacatacaaaataattatatatcatgaccaagtgcctcaggaatacttggctggttcaatatatgaaaaatcaaccaatatcatacactatattaatagaataaaggacaaaatccacaaaatcatctcaacagacacagagagtgcatttgacaaaatgtaacatgcttctggtcgggcatggtggctcacatctataatcccagcactttgggaggtgagtgaatcacctgaggtcaggagctcgagaccagcctggccaacatggtgaaaccccatctctactaaaaatacaaaaattatctgggtgtggtggcagacacctgtaatcacagctacttgggaggctgaggcagaagaaccacttgaacctgcggagcggaggttgcagtgagccgagatcatgccactgcactccagcctggcaacagagcgagactccgtctaaaaaaaaaaaagagtaacatgcttccatgataaaagcactcaacaaactagaaagaatgagaattctctaaatctgataaaggcgtctatgaaaaacctacagctaagattctatttaatggtgaaaaactgaatatttccccctaagatcagaaacaagaaatggatgtcactcactatttccattcaacattgtactgaaggttctagtcagggcaatagataggaaaaacaaacagcatccagattggaaagaaagaagtaaaactatcttaatttgtagatgacatgaacttacatatgtagaacaatcctaaagaagccacaaactttatttgaaataatggacaagttcagcaagtttgcagatacaaggacaatactaaaaaaaccaattgtatttctatatggtagtaatgggaaatgcaaaattaaatttaaataaaatttcatttacaatagaataaaataaattacttagacatgaacttcacaaaaaaaatctaagatttgtacactaaaaatttaaaaacatagttgaaataaattaaagaaggcataaataagtggtaagacattgcatggtcatgggttagaagacacaatattttttaaatggcaataatctccaccaaattgatcaacaggttcatcaaaatccctataaaaaaaatccgtggtgctttttttcacagaaattgaaaagctggttctaacatttatttatatggaaacagaaggaactcagaatagccaaaaaattttgaaaactttgaacaaagtgggaggagtcactcttcccaatttcaaagactactaaaaagctacaataataaagacagtgtggtacagcataagaatagtcatatagatcaatagaaaaaatagttttttcaacaaatggtgctgggataactggatatctatccacatgcaaaagaatgaagttgaatacctacctcatataatgtacaaaaatgaactcaaaatgaatcaaacgcctaaacgaaagggtaaactctacaaaactcttggggaagaagtatagataaatcttcatgaccttggatagggtaatggtttcttagatataacaccaaaataacaagtaacaaaagaaataaataaactgaattttgtcaaaatttaaaacttttatgcttcaaaggacatcaagaaagtaaaaagacattcacagactaggagaacgtatttaaaaatcatatatttgatatgggacttgtattcagaccatatgaagaactcataattaacaataaaaagacaaattatccaatttaaaagtgggcaaaggaataagtatttctctaaagaagatctacaaatggccaataagcacataaaaatactaaacatcattagtcattagagaaatgcaaatcaaaaccacaataagaaaccacttctcaccactaaggtgattaaaataaaaaagactaacaatagcaaaagttggcaaggatatggaaaaattggaaccttcatacattgctggtggtattgtaaaatagtgtaaccactttggaaaatagttcggcagttccttaaactgttaaatatagagttaccatatgactccaatattctacctctagttatatataacaaagaaatttgaaaacaaatgttcatacaaaaacttgcacataaatgctcatagcagcattgctcaaaatagtcaaaaagggtgaacaacccaaatgcctaccaattgatgaatggagaaacacagaattgaatattattttgtaataaaaaggaatgaagtactgatatattttactatatggataaattttgaaaacattatgctgtgatacattctacaacataaataaactttaaaaacattatgctaagtgagaaaaaaacagatagaaaaggccacatattacacgatttcatttatatggcatatgcagaatagacaaattgataaaggtgtatgccaacttagtggtagaaaaaaggaaggccaatatgggacaccgaagctaataagacatgagtaggattaaattttcagtctagtaacacatgaggaatgcctgtggcaaagcaagaccaagataaatgacataagaagacaaataaaattgcaacttcactgggaatgagatatggtagttgaatttgaagattctgccactatgtttcacaaaatatatagagagaaacatatataaatacatagacatatgaacccctgtgaaattgtgtgttgtaagaaaaagaaaaataataaaattctttaaaaaaaaactaccttgtgtttggattgtgccaaccaccacatggtaatatctgaataagtctgggtaatatgtgaatgagcatacagtttgttggcatgaacaaatattgaaatcaataagttataccagttatgaagtatttcaattctcactcctgattctgatatcagtgacagtcaatgtagtaggtttttaaattccaatctgccttaggtgttcagatccattttctggagcaggtttgaagtctgacagtccctacccggactctggttcctatgctttattatgtgcagcaagtcactgaaactgcgagatttcttcatgtataaaatcagaatgataatatgtttctcaaaagtttgtttcaagaacgaaacaaaatgtcctgtgtaaaagatctaataccacttccagaacacagtatgagctttcttttaggacagcttcattgccactgcctatgagctgaactaagcatttcatgacaagagaccctggaatataaggagtctacaaacacctacattatttagtcattcaggatgacagaacaagtgacaagagcaattgttcccaaccttagctgtgcatgtggaacatctgtgaagctttttaaatgcatataggtctgagactcacctcccaacaaccctccagcacctggtcccatgctgataacctttcttctgtataaagtcttacatagttttcacaaatactatttataaaaccctcagtgttttcttcttctggctaaaagtgcctgctgttttaactcttccactgcaaaacactgtctaattattggattattcttaaaactcatctgtgagccctggctacattatctgactgtctctttggttatgtggcttcatttatcattggtcgaacttactggaagtgaaaaggaaggttaccttaattgatagagctattgatataattctaagatatgattaattgcacaggacattttaattatatgatccgttcttcatgagacaacaaaaaccaaggcattctagacacccatgagggagctctatttctatgtctgaaaacgaaattagacttcttgcttttatttttcccttcccaaatgacatttatataacacacttaagttctgatggagtatggcaaatgtatttaactttcgaccaatatttatagaatcctttatttcataagggataaaagcaagcccagaatttttcctgtcttttaactcttgaaattgtcccctaagaatataaacaaactaaaaggcgaagcaaaacatagacaatatccccttgaatgattcataataaccacatttaagcctctctgggttttgtttgtttgtttaggtcacagcactattgggaggcaaaggggttattggctattgaagtgtttgctgttgatgaagaactaaatttaaggcatgtattcttttcttgactagagtttgattagcttcgtcatacttttgctttagggaaagaatggtatagaagaaataaaagaactaacggaagcccttccatttcaatcactgtaaagaatttatcatcataagatcaacaaagcaccatttccatgtaccttttgcaatatatatatacacacacatatatatatattttacacatatataaattatatatatatatatataaaattattgcatcggggcttctttgttgcttttctttttcctcaatgacattgagactttacctatatccaataacatttgccttcctttctattttcttgcatgttttaatctcatagtgtcacatgggttcactttacctaaagatggaatattctcctccgttggagaagaaccccaaattaggccagaagaatactgaaaaatgtatggactttgtagtcagaacctgggaagaaaaatcctaactctgccagatgaaatggtccaagtcaagttgaatggaaggattaaaatagaagattaataaaatgcagctgtagacagctggcacatagtgacagtcaataagtgacaatttataattcattcatttattctacctgcctggagaagtgaaatctaagagaaatagacaatagaaataaaatacaaatctatcaaataaaacaaagtgaattaatcagtaagcattcttgaacactaatatatataaggaagggctaacttaagaaagacatgcttttcaagagtttataaactggcttaccattttaagacattttccataaaaattatgccacatcatataaattagtaaaactctattccaatcttaacctacttgtactctatgttctagtcactctagaagtcctaatcacatgccaaaccatgccacaagtttccagggacacatttcacatatctgctgctctcagtagagggatcaataattcttccctactgggctgcagagcgaagaaaatgggatctctgataagtacaggcaatcaatccatgctggtgtccactgcagaatttaggaactccatgaaatcaggagtaagggaaggctagaccaccctctgaaaactgaacgttaagggttctactttatgcatgataaatacatagagcaaagtgaaagaaatcagatggagtctggtcagaacgaatggaagggaaaaatagttaactataacaggattgtgagatggtctagttctagtaaggggaaaggagctcagtaaggttggagaagtaggcatcaattagttccagggtacatgcagtgtagcaggttgggataaactccaacaacaaggagaactgattattttagcaagaggaaacaagacatctctgacaggggcagggggaggatgaataaacaagaggatgagtgtctggattaggctgagatccctacagcagtgggacactgggtggactctggggggaaatctgtggtaaaattcccagtaagtgtggccttggggagaaaaagagagggaaattccaagaacaaagtacttgggttttggagtcagaccagggtttgcatctgagtttgcccctttactttctagatcttagacttgaagcaagtcacctaaccagtaaataatttcttaatcacacaactttgtacaataatgcctacatcaaaggactcttctgaggattaggagataacatgtgggaaatgcctggtattgttcagatatactttgtttttattttcttttattttggtataaaatataagttcttactataagaagtttatctttctgatcaggagagatgatccaacccctaattcataaaaaagaaacaggaggaatataggaacttaaacacccaggggtgttatgaggcaccagccctagaaagaagttggaggctgaaattttagccccaactctaaagcaaagcaataatattgtctgggagctgaatccacccaaagtgaggtgcccttttctaatcctttcaaaggctctatatgggataatgggtgatcctgaaagtgtctccctaggaggtagaatacaaactactcaactgagtggcaaaacctttcatgttcaacatatgtaacatttcagtcttaaatgttttctgaattgaaccgagcattattcaggaagtgaaacactcccatgtcttgggaatacattgttcaaatagtctaaaacatcaggtatgttttattttctttttcacattataactccctgaattatattccaaaggtagaagagtttatgctagatttttacagaggatgtcttcatgcaaaattaagggattgcagactacaaaactgttggcagaagattcgggttgtttttgaggaataaatgtatgcccttccctgatgctgtcttatatggcaataaactaaataaaaattgtagttgattgacagtaattataaacctgcaacagcaataaaatttgtgttaattatcaaaaatatcagaccagttgtgctgcccattacagaacaatattgaattttctgttaaggaaattggtccacctttccctaatttttgttttgccttcctaaaggtaagcctgaaatatataatagcatatcatcagaattcattccactgactccactaaatgacttccagaaattttgctataggttgctaactaaagacagcagcatctccttgcatggaatatcagattcaaatttctttgcctgattctgggtggctctctaccaaatggccctttcccttttcctgttaactgttttgctttctaatccccaacagtttagcacattaggtgctcaataagtatctgtggaaagaaagaaggaagaaatagagagatgggcaggactatgaatgtttttttaaagacaatagaaatccccccaccaccattctacaaaataccttttgcatctgacaaatataggtaatgttattattaataatatattatttcagatattaacttctttaaaaatgtaaatcttcttggagaatcaacatttagtaatgtaatttactcatccatgccacactaagaagaaattttgaagccagaaaaagagagggtagtagaaatttgaaaaagaaaaacaataagaaaaggagaactctggaaaagatagtgctctttgcctttgtttttgctaaatatattcattcctttgatgaaccattaaaaaattattagctcctatatatcttagggatacagacattcagtcattagaagttgcgaagatcatcattccacaaatattactgggttcctgctatatgccaggtgcataagtgtagggaacaagattgcctacccagaattatgaaaccaaaatagataattacaactatgattaatgcaataatggagaactgccatggggacataacatataacaaaaaggcatactagtggggaactggaggtgggggtgactagcaatttacctatatcttttttccaaaatgatcttcaaactagaaatataagatcagttaacataaagaagaaaccgaaactctagataggtcatacaatagttagagagcatcaacccatgtgaacagtcaagtctccagtccaggtatactatacctcagggcactaaaggaacatacatattgattactgtaaataacttctgtaattctttagaaatcacagtaagcgtgatggcagaagactggagatgggtaaatctttaatccaattttcaaaatagaagttgaggcaaaagactaggaagtttaagatcagtccctgccaaaattcttagagttaagcagatggtttttgaagtcttagtaaataaactggtattcatgaaaaccaacagaatttgctaaattaagttatgctaagatgaatttattttattcttcttcattctctttcttccttcttctctccctcactcttttctttctatctttcataatttctgttattcaacaagtgcttgtccaacactttcatgaatgctttacatggaatgcttgacaagcaagctgttaaccaaaccagtggtttgcttagtaatagcaattagatattgcttagtaatagcaattagataaaaactaatttgcctaaggaacatgcattctatagtcaatgcatgaactaacctagttcagtgaatgtaagataaagaagatcctgttagcccaacattttgtaaactcccgccattccacagaccctggtcacagtggaaaattccactaaggcttgggctgtgaaaaacatcctgctggataagtcccaggcctaactgcctaactgcagaaaattcctcccttttcagcagctaacctcactgtccaccccatttcacaacaagcccagacccctcccgctcggacctataattactccagcatgcaaatggcagcgggctccagcgctagctggtatccccttctgcaggtcttttgtccaataaacctgtgttgttgttgagccagcaactctctctctcttttaccctcgccttcccttcaaagcctaacagatccctagtggtttcatggtgctctctatctatcttgagtgctctctatcttgagtttccagtgtaacatttctctcagtgtcttgataaagtcctaagaatcacagacatgttgtttacataaagcatagaaacataactagcacttgtgtcaaaatcataagggctgcttgctcaaaattcaaattcctacctatcccacagatatatttagtcaaaatttccaatcaagcgcggtggcttaggcctgtaatcccaacactctgggaggctgaggcaggcagatcaattgaggtcaggagttcaagaccagcttggccaacatggtgaaactccgtctctactaaaaatatacaagttagctgggcatggtggctggcacctgtaatcccaggtacttgggagactgaggcaggagaatcgcttgaacccgggaggtggaggttgcagttagccatgtttgggccactgcactccagcctgggtgacagagtgaaactctatctcaaaaaaaaaaaaaaattgaagtttgaagttatgtagaaatttttatttttaacaatcaccacagttatttattttgcacacttaggtctaagaaccctcactgaaatgtttaagacacattacctacccacaatcactaactaaccccatgtgtatagggggcctaattaaaatacaacaacaactataaagcttctgtagataaatgctaaaagatctcaaagatttgagggatcttccttatcctgcaatcccttttggtcttgctgcttatccttgattatcttcctctgctgcattcttttctttgatcattaatttaagtgttatgctctaatttgtttttaatttggatgacccctctgtcctaaggatgtgttttggtaaaaccctggcatcctactaccagctctacttagactccataattaaccctacacaatccctgacctctatgtcccagcctcctggaagcacctgacaacaaatatggaatcaagaaattgtgatagcactttcagtagtgtaaacaaaacacctaaaacacagagtctctgatgaattatctaattttatttctcaccgtttctactcccacttctatcatcaattccagccacataaaataatttttagctcctcaaatacatcatcatactcagcaatatcatatcatacaataaatcttttctgaaaactgccccaagtcccttccccacacctccatctaatttctagctatgtctctttagggctttctaactgtctccatcaaagcacttttcacattgaactatggaactatgatctccactaaaaggtaagccgctttatggcaggaaccataacctaacagtgtcagattcttaggatatgtttactatgagttggaaggaaaggagaggagaggggaggggaggggaggggaggggaggggaggggaggggagaggaagaatactctggagcacacaggtgggaatatctgggaggagcagaaaagacttcagaaaagagatgacatttgagctatgtcttagagtggcagagaaactaaagtgagaaggcagacatttctcttcatcacaatggccaataatcttttttgagacacaaaaatctctggcatgaattagtgtaacagttccctactaggtgtcactatatccaatatttactgtctcctagccattttccacagttcagcctagtggtctcactaaaatgaaaatctgagtatgtcctgactcttaatgtaggttgcaagattgtttataatctgactcctgcttgcctctccagatttaagggccacctccccccaccacacacacacatctgaaacactgttccaatcatatatgtacagttcctagcatgtgccaagcttgtccttttacctctgggcctatgtaccaagaacactgttccttttatttctgcctggatgatccctagtgctcctttaggactcagtttctacatcagttcctgtaggactcagttttttttatctttccttgtgaatgactaggtcaaatcacctatcacacattcttgcagaatcctacactgatcacaattataatgaaatgattgtgaaatacttgtcttccaaaaaagattacgagttccaagaaaacaggcagttggtctttttcttattgtctcctcaatgtctatcatggtgtctggcacaaagaaaatgttcaataaatatttgttggcttaatgaccaaactgaagtaaatgaatagacaaatgtttttatttccaattagattttaagcaaaatgagggcaagtttcatgtctgtcttgttcatcattgtattcccactgtctagcacagtgtctgacacataaaactctcactaaatagttgtaaaataatgaataaatgacagatcaaatgaacatggcatcctgccacattgcattactaaatgctctatgataaacacattttatctttctaaagttatattatggctgggaattaaattataaaacaatgattatcaaaaatcatagatataaacaataacatggctgtccctcagtatccatgggggattgattccaagacaccactgccccagtcccacgaataccaaaattcacaaatgtgcaagtccctatagaaaatggtgttgtatttacatataacctatgaacatgctcacgtatactttaaatcatctctagattatctataataactaatacaatgtaaatgccatgtaactagttgttatactatattgtttagggaataattatgagaaaaaagtctgtacatgttcaggacagacacaaccatctatttttttccaaatgttttccacccatggttgatgaatccatgaatgcagaacccacggacacagagagctgactttatatcacaaaaaagcttcaacagctgtaaacatttgtcatcatttaaagttataaaaattaggctctatatccaataaaacattcatgcatatatttttcacaatagttggagcttcaatgtaaaataaagcctctgtaggccacataaatttttactagctaaacgaagtatactaggtataaaaataatcaacaaaaatttagcaaggctttctagaatttagaagttcttttaaggaaaattaggatagccctcatcattaaacccggttggggtttgttaatattttccttaaatgaaagttgatattattcaatgcagtaaccaaatatctgaacatctcatttaaggtccttagatgagaggatttggaagactggaatcatcattattaatactgttgctatggatgcttttttcctaagctctttgactttatttgaagtagaccaagaatattagatcaaggggccagatggtaaatatcttaggctttgctggccatatgctgtctgtttctactactcaactctactgattcagcatgaaagcagtcatagacaatatataacagaattaatgtggctgtattccaataaaactttacttacacaaacaagcagcagcagtttgttctgcaggccagtttgcagattactcttaagtaaacaattgctgttttaactgcctagcattcattgacaattcatttgctaaaggcaccttgatttttatttgcgggatcatctctcctcctctccaaacccttgtagttgcagtggaattgacccgaggcctttagggccagaattagtcaggtggccgaagactgtccaattagaatgtctttacgttagcttcagtgactggttcaaggttgaacaaatgaaccacgatggtctactgtgtctcaatcctgggactttttggacaattgagaaacattttttatggtggggtcacaatgtaagtcttcagctgctagtagaaaccatgtagagaaaaactgcctgtgggtgatgccaacacagaagaaagcaaagcccagatatgaagagaaagagagagaccaaatccagaagggctcatctaagcaatacaacctagctgtgcctaaagacacatctcagcctacagccaaaagagatccaaattcaactgcatggataacatcaagaaaactcttaaagaagaaaagtaacccaattgagaagtctatgagatactgtggaaggtacagttatatatctctgagccagtgcagaagagtgagaggaataaggaaggatagatagccatggaatggatatgagtcagggattttttaaaccatgaaatgctgaaacagtctttctctcccacgttagtatctaaagagtctgtaattacagaacctacaaattgctccacaaacttgggggtaaaggtggaaggtggaaaggagagtcattagctaaatcatcctgaataagaagataatatacaaaatctcccaaagcagtatttccctgtaatctactaaaggcttaaaattaagggatagggtccccactcaaacagagcttgatgttttctactgcactaaccataatccatgaagaaaagaagctcagaactttaaagagggaagcatttcaggtcactttggtccaatattggaattatttgtttttgttaacttttattttaggttcaaggttacatgtgcagttttgttatatagataatttgtgtgtcacaggggtttggagtacaaattattttgtcatccaggtagtgaacttaatatccaattggtagtttttcagttctcctcctcctcctacactccatcctcaagtatgacccagtatctgttgttcccttctttgtgtccacgtgtcctcaatgtttagcagccacatataagtaagaatatgtggtaattggttttctgttcctgtgttagtttgcttaggagaatggcctccagctccatctatgttgctgcaaaagacatgatctcaccacattttctttatccagtctaccattgataggcatttatattggttccatgtctttgctattgtgagtagtgctgcagtgaacatacacacgcataggtctttatggtagaacaatttatattcctttggatatatacccaataatggaattactgcgtgaaatggtagctccattttaagttctgggagaaattgcccaactaccgtccacaatggttgaactaatttacattcccacaagcagtatacaagcattctctgttctctgtttgctgaagttgtttatcagttctaggagcttttgggtggagactatatggttttctagatatggaatcacacaccttcaaacagaaatagttttactttttctctttttatttggatgccttttatttatttctcttgcctgattccttggctaggacttccagtacgatattgaatacaagtggtgagactgggcatccttgtcttgtttcagttctcaagggttatgcttctagcttttgtgcattcagtatgatgttggttgtgggtttgtcatagatgtctgttattattttgaggtatattccttcaatcctacattgttgagggtttttaacatgaaaggaggttgaattttatcaaaagccttttctacatctattgagatgatcatgtggtttttgtttttagttctgtttatatggcaaatcatatttatttgcgtatgttgagccaaccttgtattccaggggtaacatctacttgatcatggtagattagctttttgatgtgctgctgaatttggttttctagtattttgttaaggatttttgcatctatgttcatcaaggatattggcctgaagatttgttttttgttgtatctctgccaggttttggtatcaggatgatgctggactcacagaatgagctggagagaagtctctcctcttgaatttttttgaatattttctgtaggaatggtagcagctcttccttatacagctgatagaatgtgacagtgaatccatctgatccagggcttttcctggttggtaggcttttggttactgattcaatttcagaactcatagaattgttcaggatttcagtttcttcctggttcaatcttgggaagttgcatgtttccaggaatttatccatttcttccaggtgttctcgattgtgtatgcagaggtgttgataatagttcctgagggttttgtgtatttctgtgggggtcagtagtaatgttccctttgtcttttctggttgtgtttatttggatcttctctctttttttctttagtattccggctagtgggtctatcaaacttatttattctttcaaataagaaactcctggattcagtgattttttttgggggggagcatggcttttcatgtctcaatttcattcagttcagctttgattttggttatttcttgtcttctgctaacattggaattagtttgcttttgtttttctagttcctctaggtgtgatgttaggttattaatttgaaatctttctaacgttttgatgtgggcatttagtgctataatctttcctcttaacactgctttagctatgtcccagagattctgatatgttttatttttgttctccttagtatcaaataatttcctgatttatgatttaatttcactgtttacccaaatgtcattgaggagcaggttgtttaatttccatgtaattgtacagttttgagtgatattcttagtattggtttctatttttattgtgctgtggtcagagagtatggttggtaagatttctgttttcttgaatttgttgagaattgttttctggccgattgtgtggttgcttttagaatatgcgccatgtgcagatcagaagaatgtatattacattgttttggagtggagagttctgtagatgtctattaagtccatttagtcaagtgtcaagtttaggtcccaaatatctttgttagttttctgtctcaatggtacaacactgtaagtgagatgttcaactctctcacctcacttttgtaggtgacctgtcccttttctctagctgcctttaacattttttcttttattcaaccttgaagaatctgatcaatgtgtgtcttggggatggttgtcttacatagtatctcacagggtttctctgcatttcctgaatttgaatgtcgacctctctagtgatgttggaaacattttcatgaatgatatcctcaaatatattttccaggtttcttgctttctctccctctctttcagagatgccaatgggtcatagatttggtctcccatatttcttgaaggttttgttcatttttttaattcttttttctttatttttgtttgaattagttaattcagagtaccagtatttgagctctgagagtctttcctcagtgtgatctatttgtgctattaatacttgaaattgtatcataaaacttctgtagtgagtttttcacctctatcagatgattgtgactccttcttaaaatggccatttcctctctttcagctcctgtattattttattgtatttcttagattccttggactaggttttgactttctcctgaatcttgatgatttttgctcctattcatattctgaattctatgtctgtcatttcagccatttcagcctggttaacaaccattgctagagaactagtgtggtcattctgaatacaaagacaatctggcttttcaagttgccagagttcttgcactgattttcttatctaggcaggctgatgttcccttaatctttgaagaagccgtcttttagatgaggttttttgcttttatctctctgatgcccttgaaggtttgtagtataaggtgggttcagtcaacaggctttgtttctggaagactttagggggccaaggctcagctcagcactgctgggctgtgtgctctaactcttatgggcgtttaccatgcccccagctttgttctctgaccccttgcagttaagaacctgctgtggtggaggggccgaggtattcttagactgctagccacaacgctacaatggagagtgtaagcccaagtgcttcatcagagcaatggcagagatctgtgctcactcattcatgccagcagtgcagtggggatgcacacacatgatggggtcagtgggagtggagtggcggtattcgtatgcatgctcacattggtgaccgtagcggtggggcaggggcaaggcattggcagagatggggttgtcagagtccatgtgcacatccacgccagcagcagtgcagcaggatgcccaagcatcaggaggagcaggatagcatagtgtgctcacactggcagcagtggggcagcggggtacacacacgcatgccagcatgggatgggaggcaaggtctactcacacatgcaccagtaaagcaatgtgtgtgtgtcaaggggggaggggaggtagtggtccatgcctgagtaagtgccagcaaagcagcagtggggaggctgtagtgggtgaggttgtaggtgggttggtgtgtgtcaacaagagctggtctgctggagctctccagtagtcatgcacagactgccagtgaaggagctatgatgagatccctgaggaagcaccttggttgggcttgccaggctgcactgcaagtgtgtggccaggctggagccccaggagaggccaccagacagaggggcactcagattggactggacccatcacatgggaaagaccaccctgctctatccaggtctaacagttgcccaaaagctaaagcctcctggaggagcatggcaagccttggtgtatgggtatccctggccatgctccacttcagccattcccatgccaaaccttctgctcctacaacctatctaggcagctctccctgccagctcaagtgtctgtggggattgtggggtgtcctgctgctaggattctcaaagtccatggcaagagctggtcactccttccctgttcaactcaccccttccttaggagttgctggggaccagtaatgaatcttggtgctccgaaaccctgcgcaccgttcccagcttcctcccgcttcagcccagcaactgaatcctctctccatccactctcaatgccttctctctgaagatctgcttagagtgtaccagtcttcccaatgttcttgtttctcagtgaaagatgttcctcctagttgcatctagttggccattttggctcagatcagaaattgccattttaaaaatcagatcttcattgagacttctatcaagtcaggctcaaaggcttagatttttaaatcagtgttgattttgcacaatattttagaagcttctttctgcacattaaatcaatgtttatgtcaaatacttgttctagacctccccacatctctcaatcagtgatgaccattagttttcacataaattcaagtatttatgtacttgacaaattaacaaataatttgttaagatgatcacatagaattaatattactcgttccagttgcatggtggggaaaagaaagcagaatcaatattttctgaaaacctattttgttgcaggcattatattaacttgatgatttatagctatatccttgtataaccctcacataattcaatgaggtaggttttattttccctgttctcagaaaaagaaacaggttcagcaaaattaggtaacctgtacaaataacatagttaataacaaaagtcagatatttctgcaatactctagtgcctaacatccctggaaacaaagagaaaaatctctgtggatggtgaagataagtattgctgcttaagttttgatataaaaatcatatagaggatgcttacatgcaacagataatatccaaaaaatgcataagaaaaaaatttcctcctgagaggatttaaatctaatctttgaattaaaagtaagacctaaaataattgtagaagacaacatacaatgaggcctcggtcaagtgtttcagtacttcagaaaatgaagaattttacgtgatatagaaatatttacttgaagcaaacattttataaaacagtatgaagcattcagtaatacagctgaggtacacctggggtactaatttggttatttctaggctagaaagtggtttcatgtttaattcactgctttctgaagaggaattgatctctaattgactgtaaagttatggtgagttctagttgcttattttctttgttcctgtaatattaatttcttataatctccaagcaaaatataacattatctaatgttcacttgagtgtctgaataccacacgttacctcaatagatatgttgttttttttcacatagcccaacacatttttcttcaaagtacaatacagttttctatgattttttttaagaaaaaaaaaatccaaattcagttgcagatcctctaaaaccttatccgtatccatttctttctcttgttccctagctgtgatctttaaaataaagttgatatgcaggcataccttggagattgtgattttgatccatatcaatgaagctaatatcacaataaaataagtcacacaacttttttcatttcacccgggcatataaacattatacttacactatactatattctacttagtgtgcaatagcattatatctataaaagcaatgtacataccttaatttaaaaacattctattgctaacatgctaacaatcatctgagccttcaattagttataatctttttgctggtggagggtcttgcctcagtattgatggctgctgactattctgggtggtggttgctgaagattggggttgcaatggcaatttctttcttttttcttttttttttttttttttttttttgagacggagtctcacactctccttcaggctgtagtacagtggtgccatctcaactcactgcaagctccgcctcctgggttcacgccattctcctgcctcagcctcctgagtagctgggactacaggcgcctgccaccatgcccagctaattttttgtatttttagtagagacgggttttcaccgtgttagccaggatggtctcaatctcctgaccttgtgatccacccgcctcggcctcccaaagtgctaggattacaggtgtaagccagtgcgcccggccggcaatttcttaaaataagacaacaatgaactttgccacattaattgaatctttctttcatgaacaattcttctatagcatgtgatgctgtttgacagcattttacccagagcagaacttctttcaaaatcggagtcaatcctctcaaaccctgccactactttatcaactaagtttctgtaatattttaaatcctttgttgtcatttcaacaacattcacaggattgctgagggattgttcacaggattgatgaggcctcattgtatgttgtcttttcttctacaattattttagttcttacttttaattcaaagattagatttaaatcctctcgggaggaaatttttttcttatgcattttttggatattatctgttgcatgtaagcatcctctatatgatttttatatcaaaacttaagcagcaacgttcctcaggagttgattttgtctcaagaaaccacttttttttttgctcatccacgagaaacaattcctcatctgttcaagttttatcatgatattgcagccaatcagtcccatctacaggctccatttctaattcactcactatttctaccacatcttcagttccttcttccactgaagtcttgaacctctcaatgtcatccatgagggttggaattaacttggtctaaactcctgttaatgttaatgttgatatgttgacctcctcccatgaatcacaaatgttcttaatagcaagtagaatggtaaatcctttctagaaggttttcaatttacctttcccagatccatcaaaggaatcattatctatggcagctatagtcttacattatatatttcataaaaaagacttaacagtctaagttaatccttgatccacgggcttgcagaatagatgctgtgttcgcacacataaaaacaacactaatatccttgtacatttccatcagcaatcttgggtgactaagtgcattgtcaatgagtagtaataccttgaaataaatcttttgagcagtagttcttaacagtgagcttaaaatactcagtaaactatgccataaactgatgtgctttcatccacccaggcttgattgttccatttttagagtacaagcaaaatcaattttgcatagttcttaagggccctatgattttcagaatggtctatgagcattggcttcaacttagaatcaccagctgcattcacccctgacaaaagagtcagcctgtcctttgtagatttgaagccaggcattaacttcacacctctctagctatgaaagtcctacatggcatctttttccaatacaagactgtttaatctacattgaaaatctgttgttaatgtggccacgttactaatctgctctcatgctgctacaaagaactgcctgaggctgagtaatttataaaggaaagaggtttaattgacttacagttccacatggctggagagacctcaggaaacttacaatcatggtggaaggggaagcaaatatgtccttcttcacatggtggcaggagagtgaagtgctgagcaaagtgggaaaagcctcttataaaaccatcagatcttgtgaaaactcactcactatcatgagaagagtagcatggaggtaactgctctcatgattcaattacttcccatgaggtccctccctcaatacgtgggtattacaatttggattacaattcaagatgagatttgggtggggacacagagccagaccatatcagccacctttatcaattaccttagctagatcttctcaataactttctgcagcttctccatcaatacttgctgcttctccttacagttttgtactatggagacagtttttttcttttaacctcatgaaccaacctgctagtttcaaacttttcttccgaagcttcttcacctttctcagccttcataaaattgaagagagttaagccttgttctttattagcttttggcttaagagaatattgtggctgatttggtcttctaaccaggagaccaaaactttattcacatcagcagtaaggttttttgccttgcttatcttttgtgtgttcactgtaatagcacttttaattttcttcaagaacttttcctttgcgtttacaatttggataactgtttggcataagatgcctagctttggcctattttggctttcaatatgccttcctcactaagctgaattatttctagctttgattttaaagtgggagatgtggaactcttcctctcacttgaacacttaagagcccattgcagggctattaattggcttaatttctatattgttgtgtctcagggagtagggaggcctgaggagaggaagagaaataggggaatagctagtcggtggagcagtcagaaaacacacaacacttactaagttaactatcctataatgggcacagttgtgtcaccccaaaacaattacaatagtagtatctaagctcattgatcacagataaccataacagatataataaaatgaaaaagtttgaaataggatgaaaattaacaaaatggaacacagagcaaatgctgttggaaatatgtcaccaatagatttaatcaatgcagcattgccacaaaccttcaatttgtaaaaagactgtcattacctatgaagtgcaataaggtaaataaagtgcaataaaatgaggtatgcctggatatctttcccacccactttaaaacatttttactgtgtattttctcatagacaatatattgtactattgcatgcactttaaaattacattaatagccaaataatgtacttaccctctgccacttttgtcagtcaagatcatgtttgcaagatttctagatatagttaatgatatgttttctacattttatagttttctagatatggatatttcatcacttattcactcggttctctagagatgaaaatttggattgtacttgttttgttttggtcttgcaccattacaaacaggattgcaatcaaaacttctatgtacattgaatgaaaacttctctagagttcatacctacatgtgaaattgttgagctcacagaaatttgccaaaaggttcatacaaaaatatttactacagcactgtttacaaagctaaaaactggatacactgaaattataccaaccaatagcagaacaggtatataatttttaatatatttatgcaatgcaattaaagagaattgtatagacgcatacgtgctgatacagaaagacgcccaaaattgattgctcagtgaaaaaaaaattaagttataatactctatataaaattatcccattttttataaaaataaatgataaaattaataatatatgtacatatttagagaaaaaatagagaccaatttaagaaattcatgttaataactatgtatgatatataagataaacttgtattttctctattttaaatttcaatagtaccagatacacattacttcaatctacacttataacctgaatgaatacataatttcttcttatcctaataatgacacattttgcttttctgaccactaacatcccttacaagactaactttttccattaattcctaaccaatttctgtttttagcacaaacaataatagtctgtacttacttacactactgcaatctccttgttgctatatcttgaaatttttcaaacttgaaattaattacattcattaccactgcttttaccaggaacccttctgactctataatattctctctcagacctgaataaatatcatattattataacaaccttctaggtcaattatgggatttcaagttaaaaatatataactgtaaaatttaaagaaggtgtgcagtgagaaggaagagttgttcattctggaaaaatatatttggatacccaatcaagtttccttagaatgtcatttacttgaaaaaattaaccattatccataaatgatactcttattcttaaagaattacaaaaattaatccctgtattatttctaaattgatcagaattatgggttctaattcagtctaataaaggtcacaaataattataaatatttagtaagctgttattcattgggcactatgtgcaagaaatagaggacatagtggtaaataatatagatgagctccaagtctaaaatggcatcaactaaattaggtggggatgaggctcttcattgcaatccattaagtgcagctcctggggcacaaatccttccatatatggacccatgaaatgaaagagacaagccatccttcttcaaaccccccaacctataatggtaggataggcacagcacaacagctatagacatcacagttctaatgggggaaaatgaaaagtaaaaaggagtcacaggggtcactgtttcaaaggagttctgaaatccagggagtaaatgggagtttcttgattaggtttcaagggcagagaataatcctccttggctctcagctccattctctgaaggctccatccttcttggttctgccctctgagtcatccttcctttttcatgaaaggtaacacatgtttgtagcttagtggttttatcagactgcttcctgctggtagaattttggggacttaaccatctcctttccttttgtagtattgtctctgacctttttagatgaagctggcagtgtttctgcttcaataaatttctcaagaactttgtgggtcttccatggatttcacagggattcacaccataaaagaaaagccacatccacagatgtttttaagattgtcccttttctatatcttggcttcctgctgagagggctagaggacaatgcccttcagcctcctagaggccctcaggtttgtgtgaaaaaatcagtgaggcacacccttaatctcttgaaaagagcctttgtactgaatacgctgacattttgatctttctgatatttttagcaaaagtcacacactctcaatgccatacttttgagtatggctatttctcaatgccatacttttggcagccatttctgaattttagcatcttttgccatctggagaggctgcgaattttcagtcacgtaatcctaatccattttctttaacatgtcttccttcaacttatctctcttttgcattctattacaagcagtaagagaaaaccagtagcaacttcaatactttgcttgaaatctccttagcactacatacaagcaagttcattgcccacaagttcttctttccataagatggcagaatgcacaattttgctaatagttctgcaagtatataaaaaggatccctctccttctaatttccaataacatgctcctcacttctgagcctaacagcagtgctctcaaagttcagatttctactaagggtctgttcatggcaactcaggctgctatggtttgaatgtgtcccctaaatttcatgtgttagaaacttaatccttaaattcatgtgttgattagaggtggggtcttgggggctaattagggttagataatgtcatcagggtacagtccccatgatggaactaacggctttataagaagaggaagagagagagctctgagctgacatgcacactcttgctctcttgccttgtgatgccttctgtcatggaatgagcctcactagatgacggcaccatgctcttggacttcccagcctccataaccatgaactaaataaacatctattgcttataattttctctgtctgtggtattctgttacagcaacagaaaatggactaagacataggcttcctctatcatgttctgcaaacatttcctagcctttgtctactgtctaatcccaaagctgctcccatattttaggtatgcctcttggtaccaaaatatgcataacatcttggtggcttaaaacaacactcagtcagtttctcctgcttttcatcagtcaggagtctgggcctggctcagtcttatgctcaaagcctccaaagctgcactgaaggtattggctggactatggttctatgattctgatctagagcttggggttctctctcaggtttactcaggtcattggaagaattcagttccttgcagctgtaggactcaggccgtcagtttatataagctgcctctctccataggcagtttacaaaatgattctttgctttcttctagcccagcaggagaccatctctctttaaagggcttacctaattaggtcaagcccatccagtaaaatctaccctcaataaccttaaatccaactgactgggggccttagttacatgcaaaaagccttttatatgcttatatccctctgagtcaggaaaaaactaccagagttctcactcccccatcaagagccccccgacacacacacatacaaacacatacctaattatagataatatttttttctaaaatacatccatatggttgtgtgattttctccagtggtgctgaacaaccttggttcagaagtaaagaatcttgacactagaactaatccaagaaaagtgggtaagaaaaggtccctaaaaggttctcaacatgaagcagcaggagaaattcagaagaggaagagagatctccatcagccacttggagtagataaaggtatcaggaccaagatatgctaaagggggcagataatcatcctgtcacagaacagaaatctcaattagaaggctttcctaaaaaaatttcaaaagaccataactgctcttaccacactttacgtaaccaagaagtggtaatcagataaatctcctaggaaagagcttatcaactcaattgagactacatttatatggagagggacagaggcagccaggcacatgagtcagctcccctgcccccagcaccaccttccactgtgaggttttcagacttgacaacaaggacaatttattatttcacattgaccaaaatccagtggttaaatgagattacagtcctgttgtattagtttcttattgctgctgtaacaaattttcataatttattggcttcaaacactcacaatattttactattctctaagtcagaactatgaaaatcaaggtggactaaaagtgtcagcagggatgcattccttctaggggctctaggagaatctgttttcttgccttttccagcttctagaggagacttgcattccttgggctcatggcctcttcctctaccttcaaaagccagcagcatatcattttcaaatctctctcctactctgagatttccaccttcatcttattaggacacttgtgattatactcagcctaccttgattacccaagataatctttccatcttaaaatccttggcttactcacacctgcaaaatctcttttttacagaaggtaacattttacaaactttcaggcattaagatgtgggcatctttcaggggtctcattttggttatcacaacttccaaatacctttctaatattcaaactcaatcatttcatttgggctgatgataaaaatgctctgtaatgttttaatgagtttgcttataaagtttatctgaaatatatttctataaattcttatattctctgacaaaatcaacagaggtgttagattgaacaaatttgattagctaatagaaattgttaagtaacatcatgttcttaaggagttgcttcaaagcattcacaaagcacctaatttatccttgcaattgtcaaataagtaaaagtaggtatcataaaagaaaatttcaagtaaggaaatgaaagcacacagtggctttcctagatctcccagggagaaattctggaagaaatatgaatagaactcagcttctcttactcccattcagtagcttaaaaggctaggaataatagttacaatgattcatactgattacctagtgcctcttctccaaagtactgcaaatccacaagagaaatcatcacagacacggtgatatgtctttggttagtttttctacctcctggtttcaacaaagctttaaagaagtatagagaacatggaacaatctgtgagaaactactccacctcgagtggttccacttgaaatgtaaataggtttggaaggtcttaagtaaacatgacttgaaatttaaaaaacatatattgttaacctgactggaaggtaaaaacaaatttagaagaataatggatgtgctgtctggaggctataattactggtgctctaacacagcagtgtagcgagaggctgggaactgcttcatgaaaagtgctggggaactggacagaaattggttggaatctcaattcttctgcttatactagctgtataaccttggacaagctacctaaactctcagattcctcatcttaaaaataataatagctgtcttatagagttgatataaaaattaaaggtactacatgtaaaatacccggcacataaaagcacttaatatctttcctacttgggaaaaaactaaaatgtaggaacagactttcctgttaagaatgtttgtagtggatgctctgttgtgctgcccagattctgcttcagagaggaagagtttattctccaagcggctggaagagctgctaatggaaagctctttgttgtcagcccctacagggatcgccttagttgaagagagccttttcacccaatgtccaccccattaagaatgacttgcctccagtgactgatcaaagagcccatcatcccagatcagaacttgccatggaattggcagaggcctctgttgagccagcctgccagttcagcttctccctcggtccaatcctgcttccttcctatgacttcccttctagaggtgttgatctcaatgccctccctaataagccctccgatatcctagtcacggttgggagtcagtttaccagggaacactatccagcaacaatgttgcaggatgaactgttgctcagacttttatatagcccttaccatcaccaaccactccccacaagggcccaaaggcacataactcacccaagtatcttttggttgctctggtaaggattgaagagtaaggattcttaagccttgaaccttgcttctgctgatgtttaacaagcagctggaataagtgtgaaccctctgccccagctccatttcaccccttctcaacatctttcatctgccagcttgtataaagattcagcctgccacattagaaatgttgcttatgtcacaattgaggaaattttaatatgagctgtatagcaaatgatattaataattattaatattgttgttcttgagctttataatactccagataaaaaaaaaaaatgaaggcggataggccgggcacagtggctcacgcctgtaatcccagcactttgggaggccgaggcaggcagatcacgaggtcaggagatcaagaccatcctggttaacacggtgaaaccccgtctctactaaaaatacaaaaaattagctgggcatggtggcgggtgcctgtagtcccagctactcaggaggctgaggcaggaaaatggcgtgaacccaggaggcggggtttgcagtgagctaagattggccactgcactccagcctgagcgacggagcgagacttcgtctcaaaaaaaaaaaaaaaggcagataaatgaaacaagattggcaaaatgatgaacattgatgaagctgggtgactggtattatactattctccctatctctgtatgtttgaacttttccataataaaataatgaatattaatatactttataaaagtatatacaatgtacgtactttagagatcaattgttaaagataggtttaataatatatttaacttcaagttggcttatgttaagcaaataaatcaaaatatagaaaattcatattctccaaagcaaataaaatggggcttgttaggcatcttgccaaatagttccgaaatttattttttttaagtgctgagactttctttaaaagaaaactccataaggcacttcaaactaaatttttatgttaaaagatttattttacatattaaagtacagcatacaggtattttgttcattatacagacttttagattatgaagactttatatgtaatagcatattatcccaatttttaaaagctcaattttctagatgtcttttttgataacaatgcatgtgatttaccataacatgtgtataaaatctagccaaaccacaccattcttcctccacaacccttaaagaagatcctatagactcaacaactgtgccacctaaggctatgtaaactttggtcaaacaactctgttgtatacacaaatatagctatatctacaggtatagatagagagatataatatatattatttatacataatgattaagaattaagaattaggtcaaaaatcacaacaagaaaaaaaaaagtagtatctgattcaggtattcagtctgtgtagagtggtactatttttgccaatcctcaaatgtttacttcaagtctgctatgatgagaaaacccagaaggcctaaatatataacacaaacatgtttcccatctttgtatccttctatgtttgaagatctttccgaatgttaaggtctcatccatttaaggtgatttgatccagaacattggggaatactattattcagaaaatgattcttcttaaagggacttgattatttcaatgatcatagagctgctctaagggatttctatagccaagtcattattatatccaggtacttttcatataaataagggttcaagcatctgaaacaaaaaagaaggaaatgaagtgttctaaggacaaagacaaatggtgtgagttaggagctggtctaacagcatataaagcctgaattttccaaagtattttacctgactctctggactaccccccaaataaacaaacaaacaaaccaataaaatccaaatatgtataaaacatatgcatgttgagcctagtcctataggaaacatgacaggtttgagaagaatttgatgcaaaataaaatgggatgagatgtgataacgatcaggaaaattaggatctagtactagatgtgcactaactaagctctatgaccctgggcacttcacatcttggctctcagtttgtctctctgtaagatggaggtcccttacagctattatattccaagattaagaatcaagtatgatactttcaatattaataagtaaccataaaaattttaagcaattggattaataccatcttgaattgaaataaaacaataaaaaatttaaaatttttttctaaaagttgaaaataaatgttttttattatatgagtttaggtttccaaatatgtttttctcccatactacattttcctatagctttgtgaaataatatgagattaatcttatgccaggcagtccagtgggtgctctgcaaacttggctctagaggaacttgataattcagatataagccatgcaattttatatttcaaatcaaaactatctaatgtataattaagttaaaattcaacagttacagtctagaatagccatcaattcagttttaaacacagtgtataaaattttaagtcctgcattttaggtacttgtgggctattcagcagggaaactactttaggctagtgagataaatataaaatttcatgttgtaatataattttgaggcagcattaaatgggtaaaattcaggtagtaagcctaaaaatccaagataactatagagataaataattatttttgtaaattataataattcccatatctgtgataataatagcaactacagatttgtataaggctttaatttatacaaataaatctgtttcaattattacaaatgtaatacaagatacatataatatgtatcgtgtttacattcttacggtatattttgaatgtgttacatcatttaagtaataacataatttaggcattattatctttattcattattatcatctccattttatggatatggaaattgatcaaataaaactttaaagagcaaacaggctgcctgaactggatggagagatcatggtgctaaccacatcaaggttagttgttaagtttctcatcctagtggagtctcagtcagataatcataatagaaatggaaaatgtatttaggccacaaacagattttcagcatctattgatttactaatatagctttttgttccttaatttattgatgcagtgaattactttgattgagttgctgctgtttaaccacctttctattcctggagtagattctactaggttatagatattatccacttattaaattgctgtactctcttataaaaatatctagacatacattgacatatgagatgattgatttttttaaaaaattggtattatcttaattggatttagggatcagcattatattagcttcaaaaaatgaatgttttatctttttctattgccaggaataatttagaatttatagtgatactcacacaccatgatcactttcttttctctctttattgtatgtatctgaaaaatcctaaccatggctaaatctaattccctgcctattcagagcagcttaacatggttgggggaaaattaagtttcctactctttatgatgactatttcagaccttctttcttctccagcacacaatgccccacatcactctcaatcaataatcattattatttcactgaaaaaataaaatagaaaaaaaatcctcactcttccagcagtaaatcagaaaatctacttgtatcaggatgtatatactctcatttcactccttggcaataaatgaactgtccatgttcctctagtgaagtcaatacgtccacctattcactgggtctaaactttgccttatcaggacttcgctactcaaaaaaaaaattttttttaatttctcttttttatcatttttttcacttgctacttgtaagagatattccagtctgcctttcagatttctcctcaagatagtcactaatttcccccaaatgccagaagtgttgcctacagaggtttacaggaattgccttgaccaacatgacaccacacatccagtgttttgtcagtgggtttattcaattccatggcctcagttgagttttctcttaagggtcatctcagtttcagaggtacataaagaatccaatgaaatctctgttacagttacatcacagttcaacttcttttgttccaccttattcctttcactcctttactgtattgttcccgagagcacttcccaataaatcacctacacgtaaatcttagttgtagagtcttttttttctgggaaacctaagctacaaaagttgttgccagggaattggataaaatcttcaatagtaagacattcagtagagaggataaattagtcctacacaacaggctgctatggaatcatcttagcaaagctaaaaagccattgttatacagataccaaaatcagacagactttaatgaaaacaacaggccaatatctttcatgaatatatacacaaaaatcctaaacaaatattagcaaataaagctcagcaatatgaaaggaggataatgcattatgaccaagtgaggtttatccctgggaatgcaaggttgagttaacatttgaaatcaatcaatgaagttcctcgtattaaaaaaaaaagaaaccctataatcatcttcatagatgtggaaaaggcatttgacaaaatttaatatatattcatgatgaaaaactctcagcatctgaggaaaagggaaactttctcaacctgataaagggcatctatggaaaccttacaattaacaggacaatgatgaaaagctgaatgttttcctcctaagattgagaaaaagcaagaatgcctactttcaaaattccatttaccatcgtgccagaggttctagccagtacagtgaggcaaactaaacagataagaagtatacacatcagaaagaaagcaataaaattatctttattgacagacattattatcacctacatacgaaatactacagaactttaaaagctactaaaactaataagtgattataccaaatttgcaacatacaaggtcaatatatatcagtaaaccattggacagatcctccaaagtcttaaaggcagccagagagaagaggcatgtcaaatgcaagggaactccatcaggctaacagtggtcattttagcagaaaccttacaagtcagagaggttggggacctatagtcagcatccttaaagaaaagcaattccaaccaagaatttcgtatccatacaaactaaacttcatacgtgaaggagaaatatgatcctttccagacaagcaaatgataagggaattcttaccaccacgcctgccttacaaaatgtccttaagggagtgctaaacatggacatgaaaaagcagtactgtattagtctgttttcacactgctaataaagacatacccaagactgggtaatttataaaggaaagaggtttaattgactcatggatccacatggctggggaggcctcacaattatggtggaagaacaagggatgtcttatatggcagcaggcaagagaaaataagagccaagtgaaaggggaaaccccttatcaaatcatcagatctcgtgagacttattcactaccacgagaacagtatggggaaaaacacccccatgattcagttatctcccactgggtccctcccacaacacatgggaattatgggagctacagttcaagatgagatttgggtggggacacccaaaccatatcaagtactttccaccaaaaaaatacactcaagtacaaggccactgaaactataaagcaactatataataaagtctacataacaaccaggtaaaaacacaatgacaggatcaaacacacacacatcaatactaaccttgaatgcaaacaggctaaatgccccaattcaaaggcacacagtgacaagttgggtaaataagtaagacccagctatgtgttgttaagagacccatctcacatgcaatgacaccgataggctcaaaataaagggacggagaaatatctatcaagcaaacagaaaacacaaaagggcagaggttgctattcttatttgagacaaaacagattttaaaccaacaatgatcaaaagggacaaagaatggcattacataatgagaaagggttcaattcaacaagaatacttaactgtcctagatatataggcacccaacaccagagaacccagacttataaaacaaattattacagacctacaatgatacttagataaccacacaataatagtggaagacttcaacaccccactagatcattgagacaaaaaattaacaagatattcaggacctcaactcaacacttgaccaaatggacctaacagacatctctagaatacttcacccaacaacacaagaatatacattcttctcatctacacagcacatactctaagatcaaacacacacttggctgtaaagcaattctcagcaaattcaaagaaaccaaaatcataccaatcacactcttggaccacagcacagtaaaaatagaaatcaataacaagaagatctctcaagaccacacaattacatggaaattaaacaagctgcttctgaatgacttttgagtaaaagacaaaattaaggcagaaatttaaaaattctttgaaactaatgaaaacaaagatacagcatgccagaatctctgagacacagctaaagtagttttaagaggacaggtttttctttttttcaagttttattttagatttagtggatacatgtgtgtgcttgttacctaggtatattgggtgatgctgaggtttggagtataaatgatcccaccatccaggtactgagcatagtacccaatacttagtttttcaactctcactcccctcactatctcttccatctagtagaccctagtgtctactgttgacataagatgaaagtttatagcactagaaacctacattaagaagttaaaaatgtctcaaattaacaaccaaacattgcacctagaggaactaaaaaaataaaagtaatacatgcaggaattttgtagaggggagtttaaaaaagcagcagaaaataattaccctgaatctcaagacctagaaatactgatattgttttgatatatttccatccagtctttctctgagttttttttacccagttaagattatactgtgtacatgcaattttctgtcctgctatttcacttaacaaatgtcttaaacatttctccttgtcattaaaaactctctgttcacatcaaataaataaataaataaataaataaataaataaataaataaaagcaaaccaaccccgatgctagcagaagaaaaaaaataaacaacatgacagctgaactaaacaaaactgagatgtaaaaatccatactaaagatcaacaagaccaaaactttgttgaaaaaataaataagatcaatagactgctggatagattaattaaaaaagagagagaagatccaaataaaaacaatcagaaatgacaaaagggatattaccaccagccccacataaatacaaaaaaaccctcagagacaattataaacacttctatgcacagaaactagaagaaatgtataaattcctggaaacatacaacctcccaagactgaaccaggaggaaactgaaacactgaacacatctataaggagttccaaaactgaatctgtaataataaaaataataaaccctaccaacagaaaaagccctggaccagatggatccaccgctgaattctactgcatgtataaaaagctggaaaccattactattaaaattattcaaaaagaattaaggaggagggactccttcctatctcatcctataaggccagcaccattttgaaaccaaaacctgacagagacgcaagagaaaactacaggccaatatctctgatgaacatagatgtaaaagtcccaaactaaatattagcaaaccaaatccagctgtgatcaaaaagttaattcaccccaatcaagtaggcttcattcctgggatgcaaggttagttcaatatgcacaaatcaataaatgtgattcaccacaaacagaagtaaaaataaaaccatatgattttgtcaatagacatggaaaaagtctttgataaaatccaacatcccttcatgataaaaaccctcaacaaattagatatcaaatgaacatacctcaaaacaacaagagtcatctatgacaaacccacagccaacatcatgtcaaatgggcaaaagctggaagcattccccatgagaaatgactgcacacccactaaccactcctatttataacagcactaaaggtcctagccagagcaatcaggcaagagaaagaaataaaagacatccaaataaaaggagaggaagtcaaactatttgtctttgcagattatgattctacacttagaaaaccccacagtctctgcccaaaagctcctagaataaacaacttcagcaaagtttcagaatacaaaatttattacaaaaatgaatagcatttctatacaccaataatccaagctgagagacaaatcaagaatgcaatcccaatcacaacagccacaaaaagaataaaatgcctaggaatacaggtaaccagggaggtgaaagatcactacaattagaattacaaacactgctgaaagaaatgagagacaacataaacatatggaaaaacattccatgctcatggataggaagaatcaatatcattaaaatggccatgctgcccatagcaatttacagattcagtgatattcctgtgaaactaccaacatcatttttcacaaaattagaaaaaaatgattctaagatttatctggaaccaaaaatgaagtcaaatagccaaaacaatcctaaacaaaaagaacaatgccagtgacatacattacctgactttaaactatactacaagtctagagtaaccaaaacagcatggtactggttcaaaaacatatacacagaccaacggaacagattaaaaaacccagaaataaagctgcacacctaaaaccaactgatcttcaaaaaagttgacaataacaagcaatggggaaaggacaccctattctataaattgtgctggaatagctgactacccatatgcagaagattgaaactggatcccttcctttcactatatacaaaagtcaactcgagttggattaaacacttaaatataagacttaaaatgtttaaaactttagaagaaaacctgggacgtatcattttggacataggtctgggcaaagacttcacgatgaagtctccaaaagcaatggaaacaaaaacaatcaaagataagtgggatctaattaaactaaagagcttctacacagccaaagacactattcaacagagtacacagacaatctacagaatgggagaaaatatttgcaaactatgcatccatcaaaggcctaatagctagaatctataagaaacataacaaaatcaacaacaaaaacaaataaccccattaaaaagtgggtaaaggacatgaacagacacttccaaaaaggagacatacatgtagccaacaatcacatgaaagaatgcttagcaacactaatcatcagagaaatgcaaatcaaaaccacactgaaatacaacctcatatcagtcagaatgactattattaaaaaggcaaaaaatgacagatgcttgcaaagttacagagaaaagggaatgctcatactttattggttggcatgtaaattagtccacccatagcagaaagcagtctggaaatttctcaaagaatttaagtcagaactaccattcaatccagcaatcctattactggatatatactgaaaggaaaataaatcgttccaccaaaaaaaaatgtacactcatatgttcattgcagcactattcacaacagcaaagacatgaaatcaacctaaatgcccatcaatggaggactggataaagaaaatgtggtatacacaccattgaatactatgcagccataaaaaggaatgaaattatgtcctttgcatcaacatggatgcagctagaaaccattattctaagcaaattaacataggaacagaaaaccaaataccacatattgtcacttataagtgacagctaaacactgagtacacatagacacaaagcagggaacaaacactggggcctacttgagggtagagggttggaggactgtgagggttgaaaaattacctaccaggtactatgctcactacctgggtgacaaaatcatttgtacaccaaacaccagcaacacacaatttacccatgtaacaaacctgcacatgcacccctgaacctaaaagttgaaagagaaaaaaaattaaaaattaaaattaataaaatcatttataatatgttcaaaaatatgacctattagggataaatataatgacagaacattgctcaaagaaatttgaaactggagaacattatgttatgtgaaataagccaggcatagaaagacaaatattgcatgtatttactcatatgttggagctaataaaaatgatctcataggggtagaatggtggctaccagaggttgggaagggtagcgaagcgggggatggtgaagagaaattggttaatgggtaaaaaaatatggttagacctaaggaataagttctattgttcaatagcacagtaggatcactatagttaatgataatttattgtatatttcaaaatagctagaagatttaaaatgttcccaatacatagaaatgatcaatatttgaggtaatgaatatcccagttaactggatttgataattacctggtgtttgcatgtaccaatgtgccacatgtaccccacaaatatgtacaatcattatgtgccaatttaaataaaaatcaagtcctaaattaaggtagctatgcatgatgttcatggatagaaaattcattatttataagatgccaattctttccaaattgacctatatattcagtgcaatcacagtaaataccccaggatttctataatttctatatattatagaaattgatgggctgattctaagataaataaggaaacgcaaagtacctagaacaaccagaacaatttgacaaagaacaatattgggaaattaacactatttgatttcaagacttaatacaaaagtagagtgatcaaaactgcatgggttttgacataagaataggcacagagatcagtggaataaaataagagtgtccagaaataaactcaccagatgtgaccatttgattttctacagtgacaccaaggtaattaaataggaaaataatgaaattttcaacaaatggcacagaaacatttggatatccaaatacaaaggaaatgaacctcaaaccttacaccatatataaaaaagtaacttaaaatgtaaaatagacttaaatgtaggccctaaactaaaatttctaaagaaaaatatagggtaaaatctttgtaactttggcttgggtacagatgtctctgaatacttaaagcacaaatcataaaataaaagactgataatttgaaaatcaccaaaataaaacatcatttcttcaaaacacactgttaagaaaatgaaaagtcggccgggcgcggtggctcacgcctgtaatcccagcactttgggaggccgaggcgggtggatcatgaggtcaggagatcgagaccatcctggctaacaaggtgaaaccccgtctctactaaaaatacaaaaaaattagccgggcgcggtggcgggcgcctgtagtcccagctactcgggaggctgaggcaggagaatggcgtcaacccgggaagcggagcttgcagtgagccgagattgcgccactgcagtccgcagtccagcctgggcgacagagcgagactccgtctcaaaaaaaaaaaaaaaaaagaaaaaagaaaatgaaaagtcaagccataaacttggattaaacatacatctgataaaacacttgtatcaaaacacataaagaattcttacaactcaataataagactaactggtttttgtttaatcattgaaagatataaagatactttataaaagaatatatatgaatggcaaataataagcacaaaaaagatgcttaacatcattgatcattagggaaatgcaaataacataccagaacatactctttagaatggccaataataagaatatgaacaataccaagtgatggaaattattgaatcaaccagaactctcagacattcctgatgggaatgcaaaatggcttagccattttggaaaacaattcagcagtttcttttaaacatatatttaccataagactatgtaatcccacatctaggtattttttaaaaaaaaaagacagagatgaaaacatttgtccacacaaagacttgtacttgaatgttcaaagcaacttttttcataatagccaaaaaacaatcaaatgttcatcgactgatcaatctaaaaacaaactgttcaatatccataaaaaataatgctactcagcaatgaaagggacagacaactaatatgtggatgaacctgaaaacattatgctatgtgaatgaattcaggacacaaaagaatgcatagtatctggttctattagtatgtaaatgaagacaacgcaatactatgtgatctgtgaaagcaaacagatcaaagattgcttaagtcaagataatgaggggattgattgcaaaggtaaataagggaatgtttttaagatgacaggaatgctctaaatcttaaggcaaatctttgacagttatcaaacctcatcaaattgtataactacaattcatgaatttcattgtatgtaaatgacatgtcaataaaaaaaatcaaaagtatcagacaccaaaataaatattcaaaatttatttttggaaaagtgttgatggctatattttacaaaatatttcaccctctattttcctgaaatacctgtccccctttggtgtacttatattatttgatttacatgaagctttgtaggaacacctctaaatctagatatgagaaatgcttattgtaccactatctaaaattgtgttttgtcacaaaccaagtgctttaagatctaaagatggtgaaggatacaacacatacagtctaccctggaagactatgtcattggtttttttgttgcacatacagtacactctattgctttgggatcaccaaaattaatcacttcaactaaaggtacatgttggtttttctccattccaagagagtaacaacacaactgattattcttagtgtgtgagctgagtaatgaaaaacctacagaaacatgaatataaatggaagtatataaactgtcatttcttaaaagtaggtcttcaggatagaatggggaaggaagaattacaataattaattgtaaacatttaagattctcagtgtgctaggtactgtgcataatgcagtggctataaattaatgaatggtactgatttgaaccacattatacctatttttctttatatttccaacaaatgactaacactattttatgatcagttctttttccactggaattactccattaataaatgactttttagatcaaatggctgtgaagtaagttaaaaaatatgaaaatcatatataagcaaagataaattcagggtgcttcttttttttcaattaatgccaaattatttttcaggatatgcagcattttataaaattcctaggcaagttaaagcacagatcaacaaatatttatgaaactcccatattctacaacactatattccatatggtaggataagcaacagaaacagtgtgggatccaaaggactttaattttaattgaggaactaaaacacaggtacatagattcgcatatatgttattaatgccatttcttcacagcaatactggcacatgcctgctcccttaaattactttgcctattcaaaattacctgtcaatgttagagttggcctcttgaggcccatttttctgaaaaaatgaagtgtatcattctgctcttaaacagagactctagagcccctttttcctttttcacaacagggttcattttagaaaatgtgtagctgccagatatgacaatgtaaaaaggtaggcagagaaggagataaacacagaaagaacagaaaggtgaattaggcatttaacaatttattcagaaaaatgtgccagcacctcaattttataaagtcatgggcaaaagcttatgaaaattgatttagcaaaacaaagcccagggaaatacaataatgcatttccaacttcacatggcttttatgtgaaattcttctatattaaaacatactataggccaggcaccatggctcacatctgtaattccaggactttgtgaagccgaggagggaggactgcttgagcccaggagtttgagatgagcctggtcaacatggtgaaactccgtctcaatgaaaaatacaaaaattagtgggtgtgatgctgcatgcctgtagtcccaactactgggaggctgagttaaaggattgtttgagcccaggagaccgaggctgcagcgagctgtgactgcatcactgtactccagcctgggtgacacagcaagatcctgttttgagagagaaatatatatatatatctgttctcacgctgctaattaagatatacccatttataaaggaaagaggtctaattgactcacagttccacaggggtgtggaggtctcacaatcatggcagaaggtgaatgaggagcaaagtcacatcttatgtggcagcaggcaacagaacatgagcaggggaactgccctttataaaaccaacagatcgcgtgagacttattcactatcatgagaatggcacaggaaaaacctgctcccatgattcaattaccttccactgggtccctcccatgacacatggggattatgggagctacaattcaagatgagatttgggtgaggactcagccaaactacatcatccaaactatatcatccccccggcccctcccaaatctcatgttctcgcatttcaaaacacagtcatgcctttccaacagtgcctcaatatcttaactcattccagcattaactcaaaagtccacagtccaaagtctcatctgagaaaaggcaagtcctttctgcctataatcctgtaaaatcaaaagtaagttagttacttcctagatacaatggaggtccaggcattgggtaaatacacccattccaaatgggagaaattggccaaaatgaagggactacgggccccaggcaagtccaaaatccagcagggcagtaaaattttaaagctccaaaatgatctcctttgacgccatgtctcacatccagggtacactgatgtaagaggcaggctcccatggccttggacagctccgcccctgtggttttgcagggtacagcccccctcccggctactttcacaggccagcattgagtatctgtgacttttccaggcacacagtgcaacctgtcagtggctctaccttctggggtctggagaacggtggccctcttcttacagctccactaggcagtgccccagtgcggactctgtgtgggagctccaaccccacatttcccctccacactgccctagcagaggttctctttgagagccttgtgcctgcagcaaacttctgcctggacatccagaagtttccatacatcctccaaaatctatgtgaaagttcccaaacctcaattcttgtcttgtgtacactgacaggaccaacaccacgtggaagttgccaatgcttggggcttgcatcctctgaagccatggcccaggctgtaccttggctccttttagccatggctggagcagaaatgcagggcaccaagtccctaggctgcacagagcagggaggccctgggcccagctcatgaaatcattttttcctcctgtctctgggcctggatgaggggggctgccacagaggtctctgacatgccctggagacattttccccattgtcttgatgattaacatttgacttctcattatttacccaaatttctgcagctggcttcaatttctcctcagaaaatgaatttttcccttctattgcatcatcaggctgcaaattttctgaacttttatggtctgctccccttttaaactaagttgcaattccaaaccatgtctctgtgaatatataaaactgaatgcttttatcagcatccaagtcacctcttgaacagtttgctgcttagaaatttcttccaccagataccctaaatcatctctctcaagttccaagctccacagatctctagggcaggggcaaaatgccaccagtctccttgcatagcaagagtgacctttactccagttcccaacaagttcttcatctccatctgagaccacctcagcctggaccttattgtccatatcattatcagcattttggtcagagccattcaacaagtctctagaaagttccaagctttcccacatcttcctgtcctctgagccctcccagtctctaggaagttccaaactttcccacattttcctgtcttcttctgagccctccaaactgttccaacctctgcctgtaagttacttccacatttttgagtatctttacggcagcatctcactctactggtaccaatttactgtattagtctgttctcatgctgctaataaaggcatactcgaggctgggtaacttacaaaggaaagaggtttaactgactcacagttccacatggctggggaggcctcacaattatggcggaaggtgaatgaggggcaaagtcatgtcttacgtggttgcaggcaaagagtatgtgcgggggaactcccctttataaaaccatcagatctcctgagacttattaactatcatgagaactgctcaggaaaaacctgcccccatgattcaataacctcccattgggtaccttccacaacatgtaagaattataagagctacaattcaagatgagatttgggtggggacagaaccaaaccatacacaaaacatatatatatatatttgctactaagaggattttgattgattgtactctattattggtaataattagacaaagtgggagctaggaacaggaaaacaaaaagaagataaagcaaatggcagagcagggtaaagaagctttttcatcaatattagatcttactactttttgtctaataagaagaaaggttcctgccacatacatgaagtatgcttccaacatatcttaacatcatttcactaggattaccctgacactgaggtggtggaagagtggaagtcagtaatcacaggtcctaacattgaaatttgacacaggaccttatgaaaaagccctcttggtatgaatataagctgcaaaaaagtaaaatagatgtatagcaatgaaactgaggaaaatagaaagcctaagaagtttctaatgatcaagtgattgccaaggaatgattttacaatgctcattattgttcactaagatgtgtaatatgtcatctctaacctctgtatagaatgttcagttttaattgctctatcttagcgaatcaaacttctatatttgataaggtcttttctaaatttacttgtgacttcagtaaagagaaaatgggtcctaaattagggtagtagcaatgaaaatagcagatcacataaaatgctgtgttctcacttcataagggtagatggtactgcctcaatacaatttaggggcgaatataaaaagtttcacatttgtacatgttgccatatgacacactttcagtggattcagaccaagatttttataccataagtagttttacatgggatctttagcacaaaaaaaatgacctaggtaaaaaatagttaaatccatgagatagaattggggtgaatatcaacatggagggattgaaaggataaggaggagtatccaatagagcagttaagagaagaaacacaagaaaaaagtgttacagaagacaaaggagaaacaggggtggttagaattgttcttcagcctagatgtacgagttacattgagtcagatattatgacatattacatagcctttctatagtggagaaagtcttgtaatattaaagggaaatataatgaaacagtgcaaagttaatacagaagaacaaatatctgaaggttttagctctggaaacagaaaaaaaaaacagtaaaatgctacaccactggttcaagacaaattacagtgcacataaaaatgctttgagctaaacactcttagaattaataaactgtctggttattcaatataaattcacttgatttataccaaagattcatctgcattctacagagggaaaaaatccattttctcttctctttctaaaggatttctggactctgaaagaaagtctatgatgattaataaaagtctgttagaaatttgtgttcagagaaaaaatgtaatcttttttttttgtcttttttttgagacagagtctcgctctgtcacccaggctggagtgcagtggtgccatctcggctcactgcaacttccacctcccgggttcatgctattctcctgcctcagcctcctgagtatctgggactacaggcacccgccactacgcccggctaattgaaaaaatgtaatattttgtacataaagatgatattacttccaggccaactatcagccaaaatggttttgaatttttttttattctatggaaggtacaatttatactgaattttctagaactttcctatgtgaagcatatcatacactaattaaatggttagctggagatagggacatggtgtatggcctgctccaggctttctccactttcatcttatcttaagtttagtgccatgataactgccacatccaaaaataatttaacagagatcatattttagaaatattaaactgatatatttttccatttcccctaaattatagtgacttgcatttccctacctattttattaaataacctatcagataaaattaagacaatctctggacagtgaggcttgttactcattttccctggcacacactacaaacacttcaaactctcctcaaagtagtgctgtgtctaccactttatggtactgcccaggcagtgggatcgaaatggtttagagagtcatctgagtagagaagacctgaaatggtctctctcaaatctcccacagtcatagagatggggtgaagaaccagaaatgtatatggatttccaaggccttttcaaaggtgaatggaacatggttgaaaattaacagtgagctcaagtgcttaaggtcaccacgttactactttgagtcaagatatgtttgactgtagagacaggtttatctctcttttcctcagaagcctataataatttccaactacctatttttataaactaaaattatttcatctgaagttccccttccccaggattttcaatcccttgattccacaacatacacatgtacttctgatctccttaatcgtctctacttctcatttaggttcccttgctcctgccaggctcctttccattaggtcatctatattgccagtttcaaaacctggtaaaattacctaaattatgtcttaatgaagtataacttaactttctggaaaacaacttggcaatctatacaaaagccttaaaaaagatactaacctctgtccaatgattccatttttctgagcaaatataataaaagatacagagcttaatgcataaagatatccatcagaacataattcagaagaggaaactaatggaaaccacctaaatgaatgtatggtacaatagggcgactatagttaacaataatttatagcatatttcaagataataaaaagagtgaaattagaatgctcctaacacaaaaaaatgataaatgcttgaggtgatagacaccccaattaccctgatttgactatgacacactatatctttgtattaaaatatcacttgtaccccataaatatgtgcaactattatgtatccacataactaaaaataaaaacattttttaaaaaagaatctcagtagggtggttagtcaacatggtacatttctataatcaaatattatgtaatcattaaaacagttacataggaatatactaaaaatataatgctgaaaaaagtacagtatgtatttattttaaaaattccaattttgagcacatataaacatatatagatatgtgaattaatatgaaaaaattcacaaaaatgttaactcatgtgtttattttcagtgctcattcatttaaaacattcactcacacccacacccacccacacacacacacacacacacacacacacacacgcttatttaccatctaacttctctaaacaaaaaaggcatagtccttactctatggagttgccggtctaatggggaaggtacatttaacaagtaattacaacagattatagtaacacattccctttttcttaattatctgtctctattataactgccaactccatgatggtagagatcctatttctcatgtctgtcccttgcatccacagcatctaccacagcgtacaggatcataaatatttcatgaatgtagaggaggcccagagactaaatgggagcatattagcaggagggcctaaaataactcaggaggtttgaaaacttttttgagggcaagtgccatttaaaataaactctaaagaaagaggaagaactagccaggtgaaggaggttgaaaacactgctcaaggtagaaaatggctacaggtaaaagaagtggtgttcactgaattcatagactcaaacagtggttatttccgaataagggtttgtaggcaatttctttttcaaatttacttcagtgaaggcgtatttttgtgtccatcagagaaacaatagtctaaactaaacagattttaaaatctctgacttctcagagatcaccctgattttacatgtttattttcttactttgaactgtctctatacatacaatatggaacaaattattgcaaattcagtgtcctactttagaactatcttatacttcctcctatattttaagttctttcgggtaaagaatattttttttttcctttcctttatttggtatcttccatagcactggtattgtgctgtgtacccagtatgctgtattttaaagttaaataattatagtcgagaatactgatcttattatctggtggctagtttttgttccaatgactttacagagttagtcccagagaaaccaatgagaattatgaaattttcttttatataactttaaaaaatttatctcgttcgataaaaatacttcataccgaattagaataaaaattaatattatttattatcctaaaatctcagagacagatgtttttatttttttccaggataaagagcaaagaaaaatattctgatggtcaaagtaaccatgactacggttttcagacttataacaagtgttattttcatacactctatattggtaaaaataatatattcttataaaatatatttgtggtgaagcttacttttatactgcaacaaaattcttaaaattattcattaattctaccatcagtagcttctagggtaactatttttccagtaaataccatagtgtggactcttgagagaccagaagcggtccctgcccccgaaaatatgtaaaattgccactctggttactactaagaccataaatccattttaccattgttacctcgattctcaagggtaaggaataattctcagcttccccattccaggcccatatctaaagggtagcacaagtttgataggggctctcttcgagaaagaggaacagtgtggcattagctatgttactagaaagacccaatccctagtcaaagccattgagtcttgcccctctacataaatggatatagaccctcacatctagagctgcattctaggctattaaacaatctttttcaattgctgttgctggtatctaaaatttcaaattatctttagacaatgtttcagcttctatgataacatttcagaaacagagcaaataatgtgtatggtttatttaaactatactcaaatgtactgaaaattggttcacatttccaaagaaactctgtgaataagtacagcatgctattatactttaagactgtcattctgttcatactaatataatggtgactttattactagaaacaagattttctctatctgggtaattttagttctgttcattttagcaaaattgtaatgactagaaccatcttggtggttgatctaaagcacacgaaatgctctttattttgccagctacaaacatgttaatatgaaatgcattcacagaacggaaggacagttcctttctaaagtactacggtttgaagtgaatagtcctatcatggcaaagcacaagtggaaggaaactgaccattaggtcactattggatggtaagggtatttcattccactatccaccccacaactcaaaagaggaatctgacctagtggcttactagagattggaaatgaaaaaaaaaaaaggtgaaaagaatttatttttatttatatacttggccagaaattagagagaagcttttataatacagatatcaaagggttctgaagaaaaagacatggagaaggactgaagagaagagaaagaagatgaagacaataacgagaaaagaaaaagaatgttagactatgaaagttttttcaatgaaaagagtcaaactctgtcaaatatttgaagagatttattctgagccaaatacgagtgagcaatggcccatgacacagctctcaggagatcctgagaacatgtgcccaaggtgctcagggaacagcctagttttatacattttagggagacaaaaaacacatcagtcacatacctgaaagatatacattggttcagcccaaaaaggtgggacaactcaagggaaatggggggtgttccaagctataggttgattaagaaattttctgatcagtaattggttgaaacagttattatcaatagaaatgaatgtctaggttatgataagggtttatggagaccaaagttttattatgcagatgaagcctccaggtagcaggcttcagagagaacagattgtaagtgtttcttatcagatttaaagagtctgttctatcagtagttcaaaaatagaggagagtataatgaggcacgtccatccctcaacccccatcatggccagaaccagcttttcaggttaaatttggagtgccctggccaagaggagaggtccattcagatggttggggttgggggggtcttataattttatttttggtttacagtcctcatgaagtacagtgatataataatcaaagaaaacattaattttggtagtcagagaccaaatacagatgactgcagtcagaatcttgtgattctgaattttagtttcctattgaaaaaagtttgaaattcagaagcacaataatataatttataaagaatacctaaacttacttcattaaggaaatgggtaggcatcaaggaatgaacattctctgcaacaaataatacactatggcaaataatttaatgttaaggtacataagaattcttctcatccgaatactggatatcaataaaagaaaacattgattgatttcaacaaatgatccttaattaaaacaatcgaagcgataaagaaggaattatcaaacataaattgctaaactagtagcagacagcttttacatttagcttcatttgttaaatgaagtaaaatgcctatcttacttcaaagaatgttttaaaaattatatcagtaggattaggttgtgacaatagcatttaaattccatgagaacttattataaggaaactgcctaccctgacatttcctccatggtaaaagaaaagcattcttatttataataaataaattttctttagtctttttcagtttacaaagtgcctgtatacacattatcatttatgctgacaagcagctggtgcagtgggtgtttttttttaatctccgtcttgacagagagcagcaaagcacacagtcttagatgctagaatccatgatctatcactgaatagtttgtgacttcaggcaagttatttaaactctctaaatctcattctccccctatctaaaatgggggtatttatctgcctcatagggttgttataaagactaaattaaccaataactgtgaagtgcttaaactgtcaagtgctggagttagctgttattactacagataaaactgaagtggtcctgaggatgaggagaaattggaaacttcgtgtactgttgtaagaatgcaaatttatgcagtcattatgaaaaacagtatgaaatttcctcaaaaaactaaaaatagaaccaccatataatttagcaatcccacttttgagtatttatctaaaggaaataaaatcagggtcctggaggcacttgcacaatcatgttcatcgcaacattattcattaacagccaagatgtagaaacaacctaaatgtctatcaacagatgaatattttcatcagaaaaggtgatacacagacacacactcatacggtggaatattattcagcctttaaaaagaagtaaatcctgcaatatgtgacatggatgaatcttcaggacattatgcttagcaaaatacaccagtcacagaaggacaaatactacatcattccacttaaatgtgaaatctaaaatgatcaaactcacagaggcatagagtagaatcgtggttggtacgggctggggagaggaagaaatggggagttgctattcaatggatataaagtttcagttatgcaagatgaataagctctagaaatctgcagtacaaataccatgtttatagtcaacaacactgtactgtacacaaaatttgttaagaaggtaaatctgatgttaagtgttcttactataataaaaaaaaattatggttcatagaactggcctaaaactacagagtaaataatcagaagagtcaggattcaaattctaatcttttacataaggtcaagtgactttaagtaaaccttaaaatctaatccacattagttaaagcaatatgttattcctgaaagagcatagactttggtgcagacttaggcacaaataatagtttaactcatcagtgaaatagagacataaatacctaacttgtatagtcatataagaattaaatgagaacagaaactccatgagaccaaaatgtaagaactttataaatttaaaattgatgtcttgcaatatgtggcctcactgaaaatattttaagaggtccctaaacctataatgttatggttaccagccacaaaagacatatgagttagtaagatcttacaagattgtttccttaatgcaatagatgctaatatttggacaagcttcaatgagaatttactctcgtgttattagaaaattgtgtgaaaatagtatgaattgttccaattgcctgtatattttatatattctttttctagtaaaaaatgaaaagtaataagatgaatattttattttaaatgctgaaatgtacaaaacacatttttcagaaaagaggaaatcttattagtattagtatgtatcaactcattttagaaaatataaaactaattatgtccaactgaacaaattaacaccatcatagtctagctaagcattccaaggtcgttcctttaattttatgatctcgcacattaactcatattaaagaaaagaagattcaagtaaatctacttgggttaaaacatgcccctgtataatacctcttaacacctttaaataaatgattcaaaacaaaatacatatgctttgtgcatagtacatagcatacatcttttattgtactaaaatatgcaactaatccttcaattcaaccactacattattcctggggaattttctcaccaacttttgaaattacaacctaagtttttgtaagtatccaaaaatcaacacagtttggttcattggcaaatgtttgtgatatcaatttaaatagatgcatggcatctgtgaaatatgagatgctgggctccacagctagctatgaaataattttaaagccagaaactaccttgccaaaacaaattagttggtagactcttcgatctgaataacaatgtatatttttattttcaataaatagaaatatattaaatttctagcactgccacaacaaactaccataaattgagtggcttaaaaaaaacaaaaatttcctatctcagttttggaagctaaaagtataaatcaagatgtgagtagaaccatgttccctctaaaggctccagagaaggatctttccttgcttctttcaatcttctcatggtatcatcaatccttggtgttccttggcttgaaggtgcattaccccaatctctgcctatatactcatataaacctttttcctgtgtgtcctgtgtgtgcctctgtgtcctctcctcttgttataaggataaaaaatcatattggatttagaacccatcctactctagtatgtccgcatcttaactaattatacctgcaaagcccctacttgcaaatatggtcatattttgaggttatgatgaacatgaattttgacctagtatgggggtaggtttatgcttatttcatgcaattttaatctttaaagtatgtttaagctgtaaaattctgtgattccataattgtgagaccaaaaaataaactttgtctagcacaaaaatgcacaagttgttttctcaaaattagtgattttctcataattaaaatgtttattaccaaatcagttaatcctatatgtaaacattacagtacttcctcatgtttctggactttactcatgtaggtctttaatttcactacgctacttttacctcaggatagggcaaaaaagagaagtaaggaagcatctatattgttaggatcagagtgcaggaccgaggagaccaggagaggatactgatgagcaaaaaatgaattcattccttttgagtagattcctaggagtggaattgctgagtcatatggtaaatttatgttttactttttaagaaaacacaaactattttattgaaatgactatgcaattttatatttctaccaacaatgcataaaattctagtttctccacatcctaaccaacactaatattgtccatctttattattacagtcattaaaattacattataattgtaatctgtattgctctaatgactagtgatgtgccaggaagtcttcttagtggtcgttataaaaggtgaataatacataatacttgcctttacaacatttaatgtctgagggagagagagagagagagacagagagaagcaaaaattacaacacactacattaaatgtacacacactgttataccttttactaaatagttttgtgaaatttggacattttcccttatgaatgaagaattttgtggaaattcaactaagattaaacaaagcccaacattatatacaagccatcaacctgtgaagtatttcctccatgtacttctgatctttaaagcaatcatgtaagacgttctctcaactaagtacttcattttctttaaaggacatttgcaatagaataaagtacaaagtaatgctgcatttaagtgtcctcagggaaaagaaatgaacattattattttagcagaatgtccaaaaggtgattttaatgacaatagacttttctgatgatgatttttactgattttctcatagataaaatgtttattatcaaatcagttaatcctatatcaaatggtttctataataaaaataccaaaaatatcaaatggactttcaaaaacatcgaatggcgcctataaaatggagatcaaggcacatgaaaggatctctagcactcagcaatcctaacacttctattaaatatggaataattctatacctcttgacctctatgattgcaaagccatgtaaatgagctgtatacatagtcattttccttaaaccaagtgttaaattattttttaagtctctcagatggcctacctctgaacccagtaaaaactgaaataggggtgagaaaatgctgacctcttgaattatatacaaagttgaaaatattcttaaggccctaccaagaagtagagaattaccatctgagtcttgtatccatcagaactccagtctggagatgagagctaatacattgccacattagataaaacatatagataaaaatatgatgtaacatttttttgaaggatgaatgaacacaggaataggcattgtgggagctccaggtaagggaatagtgacttaatagtagccaggcactgggtattacaagaattcctccttccttcaaagagctcattgtccagtgaagagacagtcataaatacaatgaaaatacagtaccgtaaaagcagctaacatttattgaacacattctatttgcaagctatcatttttacttagattatctctttcaatcctcacaacaaaactacaagatagataccgttactatcctcattctacagatatggaaacaggcttagagacacaacttgcacaaggctacttgacccacctctaaccgattcaagtggcccatattcataaccactgaggcagctttactgccacttataccactactataaacatacagatgttaaaataaacatagcaggcacaatgggacagagggccgacttgccagagagagtcagaaaaagtttcacagagtgtgctctgaaaattaacaagaattttccagacagagaaacagaggagaagcattccagattgggggcaaaaatatatgtgataaaaagaagcatacacggaaataacagaaacaactgttgtattagtttcctatggctgctgtaacaaaataccataaacttgttacttaaaacaacagaagctattgcagttcatagtttgggatgccagagtctgaaatcaatatcgctgggccaaaatcaaggtgttgggtgggccacgctccctccagaggctctaggggaaatttcattccttgccttttttcagcttctggtgactgccagcatcccctggcttgtaatcatattgcacaatttttaagtctagcatcttgaaatttctccatgtctgtaaagatctccctctgtctccttcttataaggatacatgtgattgcacttagggcccacctagataatccaggacaatctcccatctcaagatccttaacttaatatctgcaaagaccctttttccaagtaaggtaacatttactggtaccaagaattacatctgatttctttgggggcatttttcagtctatcacaacagtgataggggagtccatgttggtagaattggaaaatacacaaaggagtaaaggtcatgagaaatgtggcaggtgggaggggtaaaatagaagaaactaaaagaggctagcaggtcagcagggaccagatgatgatgactagattggctacagacatgtttaaattgtattctgtaggtgacaggtaaaattgacatgttttgatttgcagcattatattgtgatatttgcctgttagaaaaaaatcactacagagttaatagtgaagagagatcagtagaaggcaagagattattgaaacccttaataattattcaggaataaaaagaagagatggataagatataaatttggccattatggatgaaatatagagaaaagaacaaggagaaatttaggataactcctaaatttacagttttgggcaactgggtggatagtggggataactgtgaataggaaataccataggaggtactaaaggcaaggatgaacctggctttggacatgcaaatctagaggtgtctgcatggcatccaaattgagattctggtagataaattgatatgaaagtctggagtacaaaaggatttagaacttaaatgtatacatctaaatttgaaaatttagagatctagatttaggaatcactggccatgagtatagttgaaagtatcaaataagtcagtgttagtagaaactgcttttattgctggtcccagtgagttccaaggcagtctcttcagaatttttatgctgccatgaatgtttcaatttgttcattggtgaattttagccacctagactgtatctaattatctcattttctttagacactgcctgtaccattttggaaaattatcttattaaagtcagctcagaaaaaaaaatagagcatttagtgttctatttacatgtgattatacatactcagggtcctggtgctagggacctcataaatgctgaaaagaactgttaatcttaaaaggctttgggaaaaaattattactaatattaaccctctagggaactaatgatgaaaaattaccctaccccagtggtccttaaaactttttcatcccgtgactactcaagctctacatcatttcttctacaataccacatcacataactgcaggacttttatgccgctgcgaagggaagaaagagattatcatcttcatgagaccacagggtacactaaataaatgttgaaaacagagcaccaggcagtgactgagaaaagctacaggaagactgcagagcctgaggctttgacaagcaggtgcttccgtggtcatcaaatcactattcatagacatgtcgttccaggccagagaatccagctctgagaaacaatgcctcagccattagctcccaaaagacatcaatcacgcctgccaagacacacagttagctcaggagggatttcaaaacttaactgggtcaaaaattgcttctaagcaggttttcttaatctaatctaaactgcaacttgagaaaatagaaggaattctacctccttctaaactgtggttcctacctacatctccaacactatttttatctcttttgttttccaagtacaaaatgttttgatccaatgtaaatgagctatgtattgctttctataagacctacaaattccttcctaccttctcacatcacttattctacccagaaagtcttccctttcctccttctactttcaaaatacaaatttcatagaaatttgctgggaccatgccagatagtagtcataatgcatcttcaatatttctgccataattgtaaaatttggaactcagtaaatgctgtcttgcatatatttgctttctgtatatgttatatgcctctaacaagattttaagttctgtggatggagtcagcatttaatatcttactgggataccggtgtccagtaggtctcaatagatgaggatgacaaagactccaaaatatacatctgccttttatttctgcctacgaagattttaacaaatttttaacctgtgtaaatttttctaactaaaattttcacctctttcttaccaatatagttttgttttcatatatgagatttccttactatctttgctttaataactattttatctcaaattttaacattgcctggaaaaaaacagatgacattgtagctttagattaattttcaaagtatctgattattttaatgtatcaagagaaagcaggaagagtaagagattgccttttgtgctattttgcatatataattggctttacacaaaaaataatgcatcctgtaaggacagaaaaggtgtaaaatctttcttcactcatcataaggatcacggtcaacactcttataataaaagacaagataacaagagaaaagcataacaggtttatttaatcaaagttttgcatgacacaatacccttcagaaatgaagattcagagacccaagggacaactgtcaatttttatacttagattcgatgaagaatggacagttgtgtagaaatgagattggacagaaagggtatgacctaatggtagactgagtgaggaaacctagtaagacctcctgttcttattcttcttgaactctctgtatagcagttcttggtcctaggtataggtccggaccccttctgaaatgagtcttgtgacctactataagacaaggtagaccagagtatttctttgtggccagctcttatacaaaaagctgggagaaagttagggtaatatttctaggttttatgtctggctttaggggagagggtttctagtttctatggcctgccttgggagagaaaggggagcaggcataaaaagggcaggagaaggtcagaaagatcttgcttctgtgacctttttctttagttcaacttattcagcatgctaaagtgccatactttgtggtaccattttctgagcccaacattcccccatctgaaacttccccagaaagtttaacagtaaaaaaattgggttgttggattgtctcataagccatcaaatcagtctttcagtcctgaaaatatgtctgtccaattagacaaataatggttgtgtctaatttgaggaggtggtattgcaggtaggcctccaccaaacttagtcctccatatggtgtgagtaatcagatatttaacaatagtcatttctataaaaacaaaagaaaacaaaaggtaatgtttgaagtaatccataaactcattcctgagtccagagggtatccaattgagacaatttctagatttggcctcaaagtatcttcaggtgaagacagtgcaggcagtggcaatctaacagctttttcttgcttttagttttcaagtgagctttctgagtaatctatacagcaacaggcatgaaggttgttcatacaaaagctgctgtggtgatttccctgaagtctacatcaagtcatcaagctttggctaattttagggcttcaggaaaagaacagttttaatttcaatgatatcaagccagaagggtgggagaaaaattaaaaatattattttggagagttgtggccagatattagaggaaactagaagaatttcagaatacagcccagatttcaggtagatatggaccctcaaaaacaattagttagaatctaataacaagtgcactatagttttcatctgacacataatttttctctctatacgcactttcatttctagtaaagatactcaaagtagactgatttgtttgcaaaataagtttagtctccttaaacttctcctgattatttacataaatccagcaaaaatatttattgaccattttctttgagatgagtcttgctctgtcgccaggctggagtgcagtggtgtgatctcagcttactgcaacctccacctcctgggttcaagcgattcccctgcctcagtctcctaagtagctgggattacaggcatgtgcatattggctctttttaagtttgttttgctgaaattttcaattaggaatctcagattagacttttaaaagcttcttgaggctaggaatccaagccaaggactcactgtcaaatttcccatagtatctatatagtttggtgaattcctctctgctcaaggggtccaaaatatcctgaggtttcagggctgtcagaaagtgacattctttagccatctataaggcaaccatgtgaactttgttcaagaaaccatgccagttattgcaaagcgggctttattggctccataatgtcaaccttagttcctcgatgttgtctgaaaatatgacattccagtcaaagccttgataacatagccagtgtttccaattgtgtcatgttacaaggagaacaaattcttactgaagttacacaaataataatattgccataaaataagaatccttacaaatagtttctgaattctggagggatacagtagaaaaaaaaagtaaatgttttaattctgtttacaaagttatactttaccaaattgttataagctatagatgccttcagagaaaaaaaatctttaaatatagaaaataaacatttaaaataagaaccagaaaactttcaaataaaaagtcatgaaaacatttcctcatcagttgattcagtcctgtgtaattaattcttattatgtttgatcttggttagcagtctcattaagtcatctgtttattcattagagttgtggaaattcttacctagtccaatgatatgatcccaaagttatcagaaacctgtacttgtcagagttatttccatcctttccctgaactttcttgaagacacaacactttacaattctagttgcttgcaaaaacttttcagaaagatcatcagaataaagcaattaactatagacaagacttaaaatgatcatggttagaaatctgttaagagttcattataaccagcaaatgacaaggaaatttggtgatttctgtggcatacaacattttaacataataaccaaaaattgtgaataatagcatatcagacttctaggaatctcataatttttaaacactcatatgaataacatccatagatataacttacaggtttagcatcccttattacttgacaatgcttcccatataatttagcatatcaaataagccaactggcttatttgaggccaactggaaaatctcaaagttaatttgggtcaaaaagacttaatttagaatttaattttgagaactttgtcaaaaatgtcaaaagctttaaaacacttggttaaatattatcttggatatttattaatcaaaatgacaataaaaaatgtttaagaggctgggtggagtgcctaacgcctgtaatgccagcactttgggaggccaaggcaggtagatcacctgaggtcaggggtttgaagccagcctgaccaacatggtgaaaccctgtctctactaaaaatacaaaaattagctgggcatggtggcaggcatctgtaatcccagctacttgggagactgaagcaggagaattgtttgaacccgggaggtggaggttgcagtgagctgagatcacaccattgcactccagcctgggcgacaagggcaaaactctatctcaaaaaaaaaaaaaaaaagaaaagaaaagaaaaaattgtttaagacaaatagagaaggttacatacttgtgaacaaaaactgagctcttttaatagaaaactcagttttcttaagtaatcaaagactaatatgtgaccacatgaaataaactacattaataaaacacaaaattgtttcctaggccaattacataaaaggaataaaaactgtcacattctcagaccaaaatactccaagaaacttttgtcattttaacagggaagaccaaattgtacttttgcttcagtgtactcttaacactaaaggtaattttaaataaattttaaataaatatatacaatctcagtcagctttgaccacacaacattttcataaacattttttaaacttttaaaaattgatacagaattatgcatacttatggagtgtacattgcatatatacaatgcaacataatcaaattaggataattagcatatacattatcctcagatacttatcatttgtttgcagtgaaaacattaaaaatcctctcttctagctattttcaaatatataatacattattgttaactacaatcattctactgtgcaatggaatactggaaattattcatcctatctagttgtaactttgaacccactgaccaacctctcctcattttcctctcccctctacccttcccaacctctggtaacaactattccactctctagttctatgagatcaacttttttagctcccacatatgagtgagaatatgtagcatttgtctttctgtgtctggcttatttcacataacataatgttttccagcctcatccatgttgctagaaatgacaggattgtattcttttttatagttgaacagaattaattgtgtaaatatgccaaatattttctaaatccattcatccattgattgacatttcagttgattcaatgtcttggcttttgtgaatactgctataataagcacaagtgtgcagttatttttttgacacactgacttcatttaatctgaatatataccctgtagtaagattcctgaataatatggtagctctatttttaattttttgatggaattccatgccaatttccctagtggttgtgctattttacattcccatcaacagtgtataagagttcccctttcttcatgtcctcaccagcatttgttatttttgtctttttgataataaccattctaattactgtgatgtgatatttcatcgtggtttctatttacatttctctggtaattagtgatgttgagcatttttccatatacttcttggccatttgtatgtcttcctttgagaaatgtctattcagatctttcacccattttttttagtgaaattatatgcttttttcctattgagttgtctggtttccttatatattctcattattaaccccttgtcagatgcatagtttacaaatgttttttggtataacataagcatttttcctattttttaacaaaaatgtgttctttattcattatgaaacattttacttcctcacaaagagttgtttcctttataatttctagtattttaattacatgtattaactataatttataacttttagtaacttaatttctagttaaaagtagcaaactttgtgaactgtctcatattagtacaaatgatttcattatttctagagacatgcatttcctcaattttttacatttattaatagatccaaatatatttagcttctctatatcttataaaaagaagacgccaaagtacataaacttatgaataatcatatatgttttcatattttaacttacttagaaataactcagacaattaatgagtatctctattacttaatttcactataaggtttcaagttaccaaaaagaatttttaaactatgacaagttcatttataaacatttatctcattcacatttacctaactgtattcattcttaacagttatgtttaaattgatcatgggaaacaggctattcatcatcttatctttttgttcttttaaaaaacaaaaccaaactaaccctacatttgccagccttgtcctaaccaaagcctctgaaacactggacacagataccctccccattgttcaccccagccatcctgggtcctaaacatccactcagcacccagaaggctacaaaaggcaaggtccatatggatggtacagagctcaggacagaggacaggaaacagacagctgtgaagacaatgcctggagtacttgactgctcccaggatggccaagaagcagagttaggccagggaggatggggccatactgggcttggccctcccctgtggttgactggcagcctaggcgctgcagaaacacacatgtcctagacttcaccatagcctccttcccagaccccagaatccagaggctcaaaactaaatacataggctcacaagatgtacacaaggctttatgggagcctagcagtcattccccctagctttgacctaccaataagtcaggcaagtatcaaaaatatcaaagaagctaaaagttaaaagttaaatgtagtttttcctttttttttttcccccatgactcatatacattttagcaatccatatttactgtgcattctactctgaggttggatttaaagtattatgaccttaaacacctagcagaggtaacatacctgtttgatcagcaaacacaggcaaaaatgtctatattatatttaatgacataatcatacagaaagaagcagatcctacagctttaactttaagccacatgccaggtccaataattcaagactcactagctggatttggcgggacacgttacctgctccagatggctagagctttttaccaatttgtatggagaaggcttctgagacttttcatgggaccagtttctaaacatttttttctttctgatgacagtcatctccctgaattttgtatttccagaagataaatatcaagttctagagaagtcaggataggaaatttacatctcaaaagcacagagaaagaatgcaagttttttcatgtagtttgaggaatgttcacctattaacagagatcagtcttataaaggatgtggactagattttaggctggtaactgaggatctagtgtatgaatgtcttcaaagccccctatgagtggtacaaaaagtacataaatgagcctaggcaaaaattcaggagtccattcaaaataaccagctgatcccattattacattgggttttgggtctcttagagctgaggtaaaagcctaagaggacaacatcccatagttgggtcatacaacattttcacaatgtaccttgttgcatgggcattttcttgaggctagtgtgtaacctaatgtcaattagcccattttgtgtcccgcttatcctaactcaggagtctctgtctttgtgtgcatgggtgtggtaagcactctagtagctttcaagtgcgcaaaccatgcacaccatcaaattgtggctttggctccgaaattcctttgaccaacttagccaatgattttcccattctgtctgacccagtcaaacacctgaggcttctcttatgtgagggcacaagaaacaaagaggatggaaacaagatataatacctgtgaatttggaaaactggagttcacatcccctatagcaaaaaccacttacaaaccacttacagcaaccgctgtctgttgtattgaaaactgcagctctacccagtaactggtcaaccaccatgaatccaaaagtcaaatgccttctcacagcacaaactaacccttggtaccccaaatgccaaagatatcagggagctcaatgccaaagagaacagaggtccagatgtgagaaggactaactcatgactcttagggaagacacaggaccaaatgaggaagacagaggaccacaaaaaggaggtcaggggcacctttcctgtgtttttcaaggggtctcagagtctttagaggtctccttccggtccctatgtatgattaccagaatgctgatgttttctcttagtaattttttatctgctgaccaacaaatggaggagggaaggagttgaaggcccactcaaggaaactgaatggaagatagacggtggcacaaggaggatacaggagcagaagaaatggaaagaagaggtttagaggagtcaatctggggagatcttaagttcaccaaaaaggccaataaagttccacattgtcctcaacaaaaatcacactaacaaggaaggaagtaaacagaaaaacagaatatgtagttagcaggagtttgagaaaaggagtttcagttgactgtgaagttcccatgggagaagcaggatccaacagagaaactcagacaccttagaaaaagcctgaatatcagcttccacttaaattgacttttcaccatacagccttttaaaaaaatcctttcaaatgtcttattatcagatttcagccaggacaaacaacaaataattctgatttttttccttttccttttaaaccaaaggaaggtatccatcaagtaactcagaaccaaaaccagtaagtcttttacgacttaaccagtgatgagagagacgtcctcaagagggtgcgaaaaggtacagtcctccaaagactcagaaccactcccaaaagaaaagtcaaaagaacgaaagacctttgctaccacaggaccaagcaatgatggtggagatgacaaaagcccctttgaattgggactttttataagaaaaaaaaaaaaatcccctgagagctggcacgataaaacagagagcattcagggacctcatccactggctgcctgacacaagccaacacttgtgctctctggctgacagagatcaggggggatattctcacaagtcttaaggccgaactctcaggatgtaaaaacgagacaaacaggaaagacaaagacaactgtccctgagagggaaaggatccataacaaatgggtaccccaaggctaaatttacacaacagtcacaatccaaacaaatgattttctcctgctaacctgaatttggaaaggaacaaatacagataaaattttaccatctattctcaaccaggcattatagacagagaccagggaagagctgatgttagtaaataattctccctttgccggcttttggtcagttgtcctaggatctcacctgcaggcactggagtgagtcagttgcctcagccgctccacattgaacaccagagttacaagcgcagaaaaggtatgacacctttcctacctatcaaaagggtcacaaccaacactcctacaagaaaaggttaacaagaaaagcataacagatttatttaatcaaagttttatgtgacacaatagccttcagaaatgaaggcccacagacccaagaggaaaactgtccatttttatgcttagatttgatgaagaatagacagttatacagaagtgtgattgggcaaaaaggatatgacctaatggtaatagactgagtagggaaatgcagtaaggcctgtcctcattcttcctgacctctctgtgtagcattctttcctcatgggtatagggcaagaccccttctgaaatgagggtcttgtgacctaccattagacaaagtaggtcacagaatttctttacagccagcctctacacagaaaggtggggaaaggtcagaataatatttccaggttttatatctggcttttggggatagaagttctaatttctatgaaccaccttggtgaagaggaattctagtttctatggcctgccttaggggaaaatgggaagcaggagaaagaagggtaggagaatgtcagaaagatcttgcatctgagttcaaagtattcgcttcagtccaaagtactgagaatgccaaagtaccatactttaagaaataattttctgagccccaacaatcctaatttgaaaagttaatttataggattcaaccttttttatatcagagatgctagctgggtagaggtgtacaacaatgaatgaaaacagaaatttttgttactgtagaactctttttgaggaagtcaagaatatttatgagtatgccttttcttcacagcttaactaaaggtctgttaacaaatgtaatagagttaggcagtatctttgagataaggtacctcaaaagtccccaaaggttcttccaaaaacactgtcactgccaaaaaaggttctataatcacataagtttaggaaattctccctgttctcttcccactttggagacacatatcatgacatctagtccacaaagtccagcaggagagacctcttcaatttcataaacatatttaactacaaacactttatatcaatagtgcctaataatagtctagaaatcagaactcgtaatcgtaatactatttaggcaatgttgatctggtataaaacccttattttacagatatttttaaaagtaagagtcacagaagttaaatagctatctagttcagatactctagacagagccaaatgaacccaatctcccaattccacgtttcttccatgactcattctttacatgccaggcatttaacctaatcatcactttgtaatttaaaatttccccatccagcctcaaatacatgtttgtttgtttgtttgtttaagcacacaataatatacattttgagcatatccaaagcttatctatcaccctggataactttctgtaagtgcctccctgtttataaaattaaaaacactgaatctgatagcaaataacctgaggcctctgtgataaatgagacagggcttcggggcgtttcagccagcctcccctgagactaggtttaagacatctccatcttatgtgaagacttaaattgtgttgtagcagcttcagtgaaattatttttaatgcccatttgagattttttagaaataatagagcttttatgcaggcattcgaggcagaatccttaatgaggtaaggcatgaggaatgaattcagaaggaagattttcatgattggaggagctatgcgtcatacctaatgtacattccaggaatattttatttaaagcaaaattagtgaaatatcaatctgtggaattctacaagaaattcattttataactcctccattattcctgtcatcagtaacttcatttttcacatatgagaagttctcacgtaaatgtcctgaatatctaaaccaatgtattcagtgcccagaatatattatacatccaggattcacaatattcacttaaatatgatgattagagcaaaattgtcagttaaaaaatagcagcagtatttagctgcatttgagggaatgtgatctgaagtaccacagcaacctttcttaagccccaagcaatgcaaagtcatgacatgtacgggttcagagacacagagctgattgagcaaaatacatatcccaaagattaatggtcatctgaaagaagataaaagatttattgtaagtttttatttgacatagtgtcacacaaaagtgatctatgatgtcttcaataacaaccaccaccacaaaataatggctaacacatctaatgctcactgtgtaccaggcacagttctaagcactttctatataatcactcatttcattatcataacatctccatgaaatagtactactattatctccacttaacatctattgaaactgagatgcagagagtttaagtaacttgccaaaggtcacacagctagtaagaaacaacacataggttggattcgaatcctcaaagtccagctccaaaatccgcaatgtctgagccttactaaatgccaagcaccatgagaggttctttcttgcattacctcatttcattatgcttatttaactttatttttaggataaaatcaactgtaaaatgtttttctctttcatttacaagtttgcatggcttgtggctacatccttgaatttatcagtaaatctccaatataataaaaaccagctgtgttccacctgaaacattaaaacattattctttgcattgcgtaagttaaaaaaactgtttagtttctacttctctagcctttcttgagtaagcagctatgggtagtaaagcatacaggacaaagagatatctcaggatccagctcacccaatgagggagctacaaaagacagcaaggaaggccttcaagtaatgagttagcaagctgtctagtgataaccctgagccaatgggaatgcccttgggatgtgtcctatgcttaattcaaatatctgtggcacagcatagcatccttgaactgggagaaacctctttgtagcattaccaccaatctttcctaagtaaagttagccatttccacctcagtgaggctaatcttcaagtaatttctattgttgagtaaagaaggcattttcgactattattcaaaagtcaaaaaaataacagacgctggcaaggttgtggagaaaaagaaatgcttataccaacgctgttagtagcagtgtaaattagttcagccattgtggaagacagtgtgatgatttctcaaagacctaaagtcagaaatatcattcaacccagcaatcccattgctgggtatatatccaaagaatataaattgttccattataaaatacatgcacacatatgttcactgcagcactattcataatagcaaaaacttggaatcaacccaaatgcccatcaatgatacaatggataaagaaaatgtggtacatatacaacacagaataccatgcagccataaaaaaagaatgagatcatgtccttttcagggacatggatggaggtggaggccattatccttagaaaatggatgcaggaacagaaaactaagtattgtctgttctcacttataagtggcagctaaatgatgagaatacatggacacatagaggagaacaacgcacactggggcttatcagggggtagagggtaggaggagggagaggatcagaaaataactaatggatactaggcttaatactttggtgatgaaataatctgtacaacaaactcccatgacacacgtttacttatgtaacaaacctgcacatcctgtacatgcacccctaaacttaaaaataaagtcaaaatatatgcatggaaaaaaaaaagtcctgccaatgcctgaaactcaacatactccaaattaaatttaccctatcctattccaaaaagtcaactttattttcaaagttttctaaatatcccagatttaaatgattctttgattcctaattttttttttcaccttgcatattaaccagtcactggaacccaacattcattcatttatttttcttcacaacgtctctcagattatctttcctttctgctttcgaggcaaaacagcatacttgaaaatccatagaggctgggcatggtggctcacaactgtaatcccagcactttgggagtccaaggtgggcagatcacctgaggctgagagttcgagaccagcctggccaatatggcaaaaccccgtctctaccaaaaatacaaaaattagcctggcgtggtggtgcatgcctgtagtcccagctacttaggagactgagacatgagaatcacttgaatgcaggaggcggaggttgcagtgagttgagatcacaccactgcaatccagcctgggtgacagagtgagactctgtgtcaaaaagaaaagaaaaggaagggaagaggaggggaggggagggaaggggaggggaggggagggaaaatcaagcccacacataggagttaatgtaggtcctggattttccatgtactaacagcaaagaaaaaaaaaaagaattctcagtagaggatttccacttcctttctactttcacatgactgttcctatacaaatgcaccaacaattttattgaaaatggttttttttacatgtagtatatttatgtgatctctactgttggatctctctattgtgtatgtttatactgaaccaaatctttcagtgactctgttcatgcttttcactcatttcatccatttctcattatttcattattcttcccatctcaaatcagtagtaatatttctaggattttcataattcaaagagagtgaaaatattcctttcggttctcttaattaattcttcctcaggaaaaaaaaaaagttgctttagtttaaggtttttccagtctagaatgaaatgaatctcaagaaatctcaaggatctccaatgaaaggggagaacttgcacccccaccttgaaaattacttcttacgcaatgattccatccattactgatatattgtatcatgaaaatagtgtttataaaaactatgggaaattttgaaaaatgcttgttaactgcaaaagcagaattccaaagtgtttacacagatgacattaggtaggtaggtaggtaggcagatagattacacagacagacagacagacagacagacagacagatacacacacataaactcatgcatagaaaaaaatcaagaaaaaatcatcaacataattttgttgggataatatgacttgttgtcctttcttatatttctcctcatttttcaacttctttgaataatcacatggcacattcaatagttaaaaaaaatgaacatttactttgcagaatacttacacatcaggcaacaaaatatcactttcttccaaagtactgaaatttctctgaatctagccctgtagctaaacaaacctccctgacaatgtaatgttctggtttgggagtctgtctttacaaatccatcacataaacagaaccaatgacaaaaaccacatgattatctcaatagatgcagaaaaggacttcaataaaattcaacaccccttcatgctaaaaactcccagtaaactaagtattgatgtaacatatctcaaaataataagagctatttatgacaaacccatagccaatatcatactgaataggcaaaagctggaagcattccctttgaaaaccagcataagataaggattccctttctcaccactcctatgcaacacagtattggaagttctggccagggcaatcaggcaagagaaagaaataaagggtattcaaataggaagacaggaagtcaaattgtctccgtttgcagatgacatgattctatatttagaaaaccctatcatctcagcccaaaaacttaagctgataagcaacttcagcaaagtctcagggtacaaaatcaatgtgcaaaaatcacaagcattcctatacaccaataatagacaagcagagagccaaatcatgagtgaactccgattcacaactgccacaaagagaataaaatgtctaggaatacaacttacaagggatgtgaaggaccttttcaaggagaactaaaaaccactgctaaaggaaatcagagaggacacaaacaaatggaaaaacgttccatgctcatggataggaagaatcaatatcgtgaaaatagccatactgcccaaagtaatttatagagtcaatgctattcccatcaagctaccattgaatttcttcacagaattagaaaaaactactttaaatttcatatggaaccacaaaagagcctgcgtagccaggacaatcctaagcaaaaagaacaaagctggaggcatcacgctacctgacttcaaactatactacaaggctacagtaaccaaaacagcagggtactcgtaccaaaccagatatacagaccaatggaacagaacagaggcctcagaaataacgccacacatctacaaccacctgatcttcaacaagcctgaaaaaaacaagcaatggggaaaggattttctattcaataaatggtgctgggaaaactggctagccataggcagaaaactgaaactgaacccctttcttacatcttatacaaaaattaactcaagatggattaaagacttaaatgtaaaacctaaaaccataaaaaccctagaagaaaacttagtcaataccattcaggacatagacatgggcaaagacttcatgactaaaacaccagaaccaatggcaacaaaagccaaaattgacaaataggatctaattaaactaaagagcttctgcacagcaaaagaagctatcatcggagtgaacaggcaacctacagaatgagagaaaatttttgcaatctatccatctgacaagggctaatatccagaatctacaagaacttaaacaaatttacaagaaaaaaaaacaaacaaccccatcaaaaagtgggtaaaggataggaaaagatacttctcaaaagaagacatttatgtggccaaaaaacacatgagagaaagctcatcatcactggtcattagagaaatgcaaatcaaaactacaatgagataccacctcatgacagttagaatggcaatcattaaaaagtcaggaaataacagatatgggtgaggatgtggagaaataggtacacttttacaccattggtgggagtgtaaattagttcaaccattgtggaagacagtgcagcaattcctcaatgatataaaaccagaaataccatttgagccagcaatcccattaccaggcatatacctaaagtattataaatcattccactatgacgacacacatggatgtttattgtagcactatttacaatagcaaagacttggaaccaacccaaatgcccatcaatgatagactggataaagaaaatgtggcacatatacaccatggaatactatgcagccataaaaaaatgagttcttgtcctttgcagggacatggatgaagctggaaaccatcattctcagcaaactaacacaggaacagaaaaccaaacaccacacatgttctcactcataaatgggagttgaacaatgagaacacatggacctggggaggggaacatcacacactggggcctttcaggggttgggggaaaaagggagggagagcatgaggacaaatacctaatgcatgcagggcttaaaacctagatgatgggttgataggtgcagcaaaccaccatggcacatgtctacctatgaaacaaacctgcactttctgcacatgtatcccagaacttaaagtaagatttaaaaaaaaaaacaaaacaaagcaaaacaaatatacataaacatagatacacacttaatacaatcaggtaggcatatactgagtgatttttaatgtaaattaaatcacatcaatatttgtttaaaatcctccaatagcctctcttttgaattgaaataagtcagaactctttacctagatgtacaaagtccaatacaatttagctcctaaccacctctttgacctcaatccctaatgctttccataactcactctagggcagctcctttggcttcatttgtgcttctttctgcctaatagagattttctgatggctgaccccttcctgtcattaggtatcaactcaaacatcaccttcccagggaggcctccatttactacacagtctagtctgtcatccatttcttttccccagcactgtttccatcacctttaaaagcttttgtatgtataaggacaaaacactgctgaaagaaattatagatgacataaccaaatggaaaaccattccatgttcatggattgaaagaatcaacatcttaaaatctctatactgcgttttttccccaacagggttgattagaggcttttagcacgcctcagtaacttggaagtagcataaaaatagtgcataaaaatcaactctggggactttaattcaagaaggaaaatgggaatcctcagcattcgtgaaggacacccaagatccctgggaggagaatgctggccaacagcttccatgacagcatctggctgacaaaaatgagtgaagccccagtatgtgagagaggcagagaacttcccactgtaactcatctttccactgaggattggagcaaccccaactgagaaagagcactttgtttctcccaagccttggaaataacttgggaaggggcttagagacattgtgagcgcaagacaccaggaaatactgcagacattttcccagacccaggactgagagcaggattctgtttttaattcgagtgcatactaagtcaagcttttctttgtgactcagcagcatagccatgcaggcattttagtctcaggccggagattggaatggctgctctggaacaggctaggaatctccataaccagagctgtgaaaagcacctcagtagtcggcactggaattgtactctaccctgtcacaaccctgtggtagaaggagagctgctacagctgcagtttctcctgggtgatgatacttgcagacagggctggcttggtgacctgctgtgtgtgtgccattgttgggtgctccagcctgctcccctgagttcatggtgcagcaggaccctctctgcctcatacccaggcagaaattcaggcattcagagcacaccctcacatggacccacagcctgagccaccccacccttcatgagtatagatcatgatgcatcaggaccctctccacaccatgcccaggcagatttccaggtattcagagcaccccctcactcacctgaatcagcagcctgagccaccctacccttcctgtgcatagacttagatacagtggggccctctctattcctaatgtggccagacctccaggcatttagagcaccgattcacatgaaacagcagcctgagacaccctagtcttcctgcgcatagatctgggtacaggaggctctctctgcttcacacccaggcagatctccaggcattcacctggttcagcagcctgaaccttcccacccttcctgggcatagattgtggtgcagcacggctctctctactcacgtccaggcaggtctccagacataaaggatacctgctcaccgagatcagcagactgacatgttctgtgcttcctgtgcacagatcctggtgcaggaggccctctgcttcatgcccaggcagatttctaggcattctgagaacctattctcctagattaggagtttaggctgccctcatccccctgcagagaacttggggctgaggaggtttcccaactccacacctaggcccatttctgggtgcttggaggccacccactggattcttgcttggcactggtacctgtgcctgccattggaggacctgttggcagacctgcctgttccagtaccatctatcttacccctctagagctgaggagggagctcagaccactgtgcactccacacattcacccattgcctaagacaaaagagagcttctcccagtaaacagggatcaagtatacacccagctacggtggcctcagctggctgttacctataagcgccatctactggcttgtaggttgaactgcacagcccaatataaaccctgccaacagaagagcacagggctgtagaagcaaagccaaaacaccctacccagtattctctacagtcacaccccttagggagatgggaaagggaaaaggacattttgaaaataatattacagagaaaaaaagaagagaaaatcctagatgcatgagaataattacaaaaatttgaagtgccagcatctccagatgagaaagattctggcaccatgaaaaatctgaatgtagtgacaccaccaaaggatcacactagctctccagcaatggtccctagccaaaatggaaactcaaaagtgacagataaagaatttaaagcattgattgcaaagaagctcaacaaaatccaaaacaaagttgaaaatcaacacaaataaacttctaaagcaatccaaaaaatggaggaatagataaacatctttaaaagaaatcaatcagagcatttggaattgagaaatttgaaattgaaaggaattgaaatactttcaagagaaaatttcaaaatacaattgaaagcttcaccaattgactcgaccaagctgaagaaagaatttcagagcctgaagactggtcttttgcactaacccagttagacaaaaacaaagaaaagagaattttaaaaaatgaacaaagtcttcaagaaagataagattatgtaaagtgaccaaacccatgaattattggcattgatgagagagaaagagaaaaagtaaacaatgtgaaaacatatttaagggaataactcaagaaaattaccctaatcttgctagagaggtagacatctggatagaagaaacccagagaacacctgcaagatactatacaaaatgaacatcatcaaggcatatagtcaccagcctgtccaaagtcaacactaaagaaaaaatcttaaaggcaaatagtcagatcacatacaaagggaaccccatcaagctaacatagacatttcagttgaaaccttacaagccagtagagatacaggcctattttcaacattcttaaagaaaagaaattccaaccaagaatttaatatcctgccatactaagcttcataagcaaaaaagaaataaaacctcttccagacaagcaagcactaatggaatttattaccactagaccaaccttacaagacatccttaaggaagttctaaacatggaaatgaaagaacaatacctgctaccacaaaagcacactaaggtacatagcctttagaccctaaaaagcaagcacacaatagaaactacaaagcaaccagctaattatttcacaataagatccaaacctcacataccaatattagtattgaatatatattgtctaaataccccccacttaaaatcacagagaggcaaattggaaaaaaaaaaaaaaaacaagacccatctgtctgctatcttcaagagagacatcttacacataacaccacccataagctcaaggtaaagggttagagaaagatctaccatgcaaacagaaaatgaaaaagagcaagggtcactgtctttatatcaaataaaaaagactttaaaccaacaacagtagaaaaggagaaagaagggcattacatagtgataaagggttcaattcatgagaagacttaactatcctagatatatacacacccaacattgaagcatctggattcataaaacaagtatttctagagctacaaaaagacttagacagccacacaatgaaaatagtggaggacttcaatatcccactgacagcattagacagatcattgaggcagaaaacaaagaaattctggacttcaatttgacacttgactaattggatctaatatgcttctaaagaatactccacccatgaaccacagaatatacattctacctgtctacacatggaacttactccaagatcaaccacatgcttgaccagaaggcaaatatcaataaaaacaaaaatttgaaatcataccaaccatacccatggaccagagtggaacaaaaataaaaattattataatgatctcttaaaaccacacaattacatgaaaattaaataactttctgctgaattacttttgggtaaataacaaaaagcagaaatcaaaaaattttcctgaaataaaaacagacacaacataccaaaatctctgggatgcagcaaaagcactgttagtaggaaagtttatagcactaattgcctacttcaaaaagttaaaaagatctcaaattaacaatgtaatatcacaccaagaggaactacaaaacaagaacaagctaacctcaaaggtagcagaaaacaagaaataactaaaatcagaacagaatgaaataaaagtgagaccccaaaagtcataaaaataatcaatgaaaccaaaaattgtttttgtaaaggataaaggataaaaaaatcaatatactgctaaacagattaacaaaaacaaagagaagaacacaatgagaaatgacaaaggtgacatacaactgatcccacagaaatacaaaagatcctcagagactgttatgaacagttatgtgcatacaggtgtatgcacataaactagaaaatctagaggaaactgacaaattcctagaaacacacaacctcccaaaattgaatcaggaagaaactgaaaccctaaacagaacaatatgaagttccaaaactgaatcagtaagaaaaaacttacccaccaaaaaagccctggaccaggtggattcacacctaaattctaccagacatgcaaggaagagccagtaccaattctactgaaactattccaaaaactcaaaaaggaacactgctgcctatctctttctatgaaaccagtatcaccatgataccaaaacctgtcaaagacacaacaataacataaaagtaaaaactacaggccaatatccttgccaaacatagatgtaaaaatgctcaacaaaatactagcaaactgaattcacctgcacatcaaaaagcattttaccatgatcacacagacttcattcctgggatgcaaagttggctcaatatatataaatcaataattgtaattcaccacacaaacagaattaaagacaaaaaccatatggtcatctcaatagatgcagaaaaagcattcaataaaatctaacatctcttcatgattaaaaaaaaatccatcaaaaaactaggcatcaaaggaagctaccttaaaataatgagtcatctataacaaacccacagctaacatcattctgaacagggaaaaaattgaagcattttccttgagaactggaatcatacaataatggtcactctcaccacccctattcaacatagtactggatgacctagccagagaaatcaggcaagagaaagatacaaagggcacccaaataggaaaagaagtcaaactctcttcttactgacgatatgatcctatacctagaataccctaaagactctgccaataggctcatggaactgataaacggctgacaaagtttcagaatatgaaattaacatataaaacttactagcatttctataaaccaataacatttggctcttatctgagagccatatcaagaatgaaaccccttttacaatggtcaccaaaaaataaaatacctaggaatacatctaaccaaggaggtgaaagatctctattaggaaaactataaaacactgcctaaagaaatcatagatgacacaaacaaatggaaaaacattccacgctcatggattggaagaatcaatatcattaaaatgtccatactgcccaaagcaatctacattttcaacgtgatttctaccaaactaccaacattatttttcacagaactagaaaaaaactactctaaaattcacatggaaccaaaaatgaggctgaatagccaaagcaatcctaagaaaaaagaacaaagttggatacatcttattacccaacgttgaactatgctataaggctatagtaaccaaaacagcatggtactcttacaaaaatagacatataaaccaagggaacagaatacagaaccctgaaataaagccacacatctacagtcatctgattcttgacaaatcaacaaaaataagcaagggtgaaagctcctcttattcaataaatggtgctggaaaaattggctagccatgtgcaaaagattaaaactggaaccctacttttcaccataaaacaaattaacccaaaatggattaaagacttaaacgtaagacctctaattgtcaaaatcctagaagaaaagctgggaaactactttttagacatcagccttgacaaagagtttatggcaatatcctcaaaagcaattgcaacaaaaacaaaagttgacaattgagacctaattaaagagcttctgcagggcaaaagaaaactatcaacagagcgaacagacaacctacaaaatgggagaaaatattcacaaactatgcctctgacaaaggactaatatctagaatctataaggaacttaaatcaacaagcaaaaagcaaataaccccattaaaaagtgggcaaaggagatgaaaagacacttctcaaaggaatgcatacaagtagccaacaaacatgaaaacaaaaatgctcaacatcactaatcatcagagaaatgcaaatcaaaaccacaataaaatactaactcataccagtcagaatggctattgttagaaagtcaaaaaatagcagaagttgatgaggctgaggaataaagggaatgcttatacactgtatgaatgtaaactacttctgccactgtgggaaacagttgggagagttctcaaagaactaaaaatagagctaccattcaacccagcaatcccattattgggtatataccaaaaggaaaataaattgctcgaccaaaaagaaacctgcgctcatatgtttatcacagcactattcacaacactgaaaacatggaatcaacccaggtgcctatcaatggtaaatttgataaataaaatgtgatacatatataccatgggatactatgcagccataaaaaaaagaataaaatcatgtcctttgcagaaacatggatgcagctggaagtcattattctaagcaaattaatgcagaaacagaaaaccaaatgtcacctcttctcataaagcgggagttaaatcttgggtacacatgaacaaaaacatgggaacagcagacactggggagggaaggagagaggtgggtaaaggctgaaaaacttcctactggttgctatgtttactatatgggtgataggatcaatcatatcccaaacctcaatttcacacaatatattcttgtagcaaatctgcacatgtaccccgactctaaaataaaaatagaaattttaaaaaaactgtacatagcacctatcattatcaagtctccttgcttatttctttacttgccattgtttgtctccactcctagaatgcaaaatttatatcactgcatccttcttacttaaaacagtgtctgatacatagcaagagaacaataaataaacattaaaggaatagcaactgaagaaagacagtgataagaatagtagttgtccatgatacaaatgttggttttaggattctctttaaaaacatacatagctgatttccagtcttaccaacttcatgataacaatgcagctggtgtaacttaatatatgcaaataaatataaatacttctggaaaaagtcaagaagtaaagaaaacgttcacaggagaggatgagaatatagaggttttgcttatcacagagagtagtaagaaaagaaatggaaattgagtccaatgagagtaataaaagggtaatgatagtagagaattggtttctagtggtggctgaggtataataggattagtccagaaagtctccttgtggaacatgggcacttggttctatgctttggtctgccacacatcaggcatcttcttagatagccccccaaggaatggctgaaactagggcatctgtgatcatcaactaaaagatacctaaatctttctatgaggtgtatgagactgctatattgactatatggtgatctgttttcttctatatcaaaatgaaatgctctaacctgagaaaaacaggttacatgaagaactaaaacatatagtttttagttttctgggctaaatatatgttgcaaaaatacaaaaccatttaagagcaaattacaaatttaattatcacaaaacaaccagcccctaaaatatcaccttttcaatatattttaagtagccagcggtccaccattgccatgaaaaatggtacatcaaaggtatttaacatgctgtaatttattctccacttccaggtgacaatgacaaattgctcaagttccctccttgttctttgcatcatcactacatgtttgaaaaatcgatatatcacttgcaaccaaggattacaaatgcagcccacatcctttcactttcttttttctttccccatctatcagagcatttccctctaatcattgcttacctgttctttcctctccatctttacttgttctctccctgagaccatattccatcttcttcatgaccaccccaatcttttacctcacactcaacaaagcaattctttacccacctttataataggtcaagctgctagccatgaggaggccacagggcctgactggcatacattggggcgaatggaaaaccatcctgggaatctagggtttggtaaggagcaagatatcaggaaagaggcatatgagaaagaagaccatggacagggcctgagcagcactagaccgcagggtcaatcagagaggtcaggtgtattatgatccgaaggcacataaacacaccagaaataaagaacaaggttggtgatgtctttcatctttctatgattgtttctcccttctattataaaatatgcactggccattcaaaggatataataaaataatagacaccactttcccttttctctcacaaattcccttataatccctgataattttacatgctttcagaatgttagcgcctgataagtaaaacaaaatttcagtttggccacagactcaaagcaagaaataggactccttgaagttgatttgaaataaatatagctatatttttgctgctatagcaactataaaatagaactatttattgacatatgcagaaaacaacataacattttattaatacacaattgagatgttctttacctttttatgtttacttattaatgggttattagtcattattagaacatttacatgatagagtagtaattaaaacaaaaagagaaattgaatgcatcctttagctataataaaggctaatgtttattatgtgccaggttttctgttaggcacttgacaattatcagttcatttaatcctcacaaagcaatgtagtattggaattatcctcattttacagatggggaaatggagggcgattcagagaaattgagcatattgttaataagtgatacagtcagaattagtacccagactgccaaacaactcacatttgccaaaaagcaaagatgctttttacactattccagcatatctccctacaatgacaccaaaggaaacttcagaattcaacaaacatagcctgagggcctgcggcatgcaatgcacacagcagagtgtgctggagatcataaacatttgtcagaaacaaatgttatcatctaaaagaagagataaaacatgtatataaacagctataataaaaggcagaaagccacagttatcaaaaagaaattctttgcatgttaagagaaagggggttatttctggtggagaggattaaataagactttaggaaggaaatggaccttaaagtttataaaattaatagttttgcaccaactacttgctcactgacattaggaagaagtacccatctcgcattccacaaagaacgtacagtcatgtatcatttaaggatgaggatacattttgagaaatgtggcattaggtgatttcatcgttgtatcagcatcactgagtacacttacacaaacctaaatggtacagcctactacacacctaggttatggtatggcctattgctcctaggctacaaacctgcacagaatgttactacactgaatactgtagacgattgtctacagtattaaccatttgcatgtctaaacaggggaaaggtgcagtaaaaatacatcattataatcttatgagcccaccatcatatacacagcacttcattgactgaaaggtaattaggcagttcctgaccacgtctcatttagaaattagtttctaaaaatccagagtggttctacaccaatcctaatctggtttctgtttctaagaaatgtgtttaagttaaacatctaaaaaaaatttctgtgaaattttgagctttgagcttaaaagtctgaaaacttacactctggattctggttacatgtgaaaaatactttttaaattattgtccacagcattgttgccttttttctaagctttcgtttttctgtacaggataaaacattttctcatctgaaaatatttccaaatagacccttattgccttaatctgttttgtgttgctattagtataacagaatacttcagactgggtaatttattcaaaaattagagatttatttggctcacagttctggaggatgggacatccaaagtcaaggggtcccaatcttgtgagggccttcttgctgtgttatcccatggtggaaagcatcacaatggtgagagagcaagagcagagggagccaaacttactttgtatcaggaatccattcctgcaataatagcattaatccattcatgagggcagagcccttgtaacctaatcacctcttaatggtcccacctcttaatacttaatgggtaggacattcaaatattagtacatattaatgtggatcttattatcagtattaggattctaatttatttattttgtagacctgaggtcagccaacttcaacaaaaatccatcctaccacttgcttttatgagatcttattgaaacacagctatgtccgttcattttcatattatctatggctcatgatacaatagcagaactaagcaatgtgacagaggccatatagcactcaaaacccaaaatagttaccatctaaccttttacagagttgcagacctttgccatagaccatccattcactcagcaagtatttattaagagcttataagggcaggtggctggtaggtagctagcataggttgttggctgaaaaactgtagcctcattaaactaagttaaaagttaattcatactgaattgtattcttcaatataattatcttcacatacgagaaaaaaacttgaacaacttttcctgtggaaaaaaatgtactaagtgacttggaatgtaatattactaggaggtactctactattactacttacactattgagtaacacttattgagcatttactgtgtgctcaacactattataaacacttaatataaatagtatatgtcattattcctcactacacctctaggatgtaagtgctgttactatcctcactttacaaatggtgaaattaagactcaaaccaattaatttctgaggtcacacagcttatatttgttaaagctgggactttatagaagatgctttcattcttggagatattaaaataagagagtggataacttattaaaaaggtaaaatggtgtacctttttaaggggagcaaaatataaataactaccatttactgagagcctactatagttctgtcattatgctatgtgctttaaaaacattctctaatttttatatcaacccttcaaggtaggtataagttccctcttttacaagcaatgaaaaaataataggttatatgactgacaaaaggtacataccttgtaagttgcaaaactaaggttaaaatttagatctacctgtcttgttctagaatacatgctaaattctattttttaaaaaatcctaggtgtatttttctaattcttgaaactgaactgcacttacaaatgaaagcaacagatgttcagcagctgaacaatgaaatatcagataggacaaataatgaaaatataacctacacaactaaaatagcagagaaaaatatagaaatatgaagcatatttctatatgtaaatacagaatttgttcctaatggtagccaggattcaaatcagaataagctacaatagaaatttctgaaggcactaaaataatctgaaatctcattaattcattctctaataaagcactgatgcattgacacttagcagatatctctgttgtaatcagttatccccgtttccatgggagaaggggactggtcaacccatttccatatttttgctgaagaaacatctaaagatgtgaacaatacccttctcttagatatgattgaataataaagaaaaaaaaagaggggactctgggctttaggaccaaagagaaataagttggtatattcacctctgctgcttcataactgtgtcaccacaacaagctaattgacttctctgtaactgagttttctcatttaaaaggatgtttatgagagatgctgtagaaaagcatcaggcatgccctcttaaaacacatctaagggaattattattctttcagttgtaatcacttttctcaaggaagatctttaagagaaaatattttctcacttattccctttcctagtggggagtaacaggagcaagactcactgtgtgatgccccgcgttgccttgggactctacagcacgtccttaccagcaagaaggctctcaccagctctggccccttgacctttgatatgtttggctgtctctccacccaaatctcatcttgaattgtagttcctacaattcccatgtgtcatgggagggacccagtgggaggtaattgaatcatgggagcgggtctttcccatgcttttctcatgatagtgaataagtctcaagagagctgatggctttataaaggggagttctcctgtacatgctctcttgcctcatgtctcatgtaagacatgactttgctcctcattcgccctccaccttgattgtgaggcctccccagccatgtggaactatgagtcaattaaacctctctcctttataaattacccagtctcgggtatgtctttattagcagtgagggaacaaacttatccaatcttggacttctcagcctccagaaccataaaatacaaatttattttctttataaattccccagtttcaggtattctgttataagtaacagaaaatgaattaatacagaaaattgttaccgagaagtggagtgttgctgataatgaataactaaaattgtggaagcagctttggaactagataatgggcagaagctggaagaatttggaggagcaggctagaaaaagcctagattctggtgagggtttagaagacaagacaactagggaaagtttggaagtccttagagattggttaagtagtcatgaccagagtgctgatagaaatatgcacagtaaaggccatttcgatgaggtttcaaatgtaactgaggaacaagggagtggaaaccagagcaaaggtcattcttgtcataaatgggcaaagaacttggctgaactatgttaatgctgagggctttggggaaggcaaaaatcaacagtgatgaactagagtatgtggcagaagaaatttctaagtaaaacataaaagttgctgcatggttacttttggctgcttacactgagaattgaaagcaaataataacttaaagaaagaatttataatcaagagagaaggagaattgaaagatttggaaaatgctcagcctaaccacataaagaatgaaaaaatgtgttcaggagaggaaaccaagggtgtagcccagtgaccacttgcaaaagagattactacacacaaaagggagccaggtgctattcctcaagaaaatggaagaaagacccagaaagcatttcagaaatcttcaaggctctcccatcacaggctcaaaggctgaggagagtagagtggtttcacgggacaggcctggggtgctcattgcccaggtccaacttgtgactttgctccccacacccttgcatggtgctccatggttgccccagccatggcttaagtggtcccaggtgcagatcatgccacagttcctgatggtacaagtcataaactatagcaacatccatataatgttaattctgtaggcttgcagaaaacaagagctgtggaggcttggcagcctccacccagatttcaaagaatgtcatcaaaagcctggggtctcaggcacagacttgttacaggaaaggagtgaccacagacagcccctgctagagcaagaaaaagtggaaatgtggggttggagctgctgcagagaatcctcactgcatagggcagtacctagtggagccataggagcaaaaccaccaccaaaatgccagaactatacagctgccagcatgcaatcctagtcgaggagagctgaagcatgagctaagcccaggaaagccacaaaggcagggtttttcaaggccttggggacttaacccccacatcagtttgtgcagaatgctagtcatggagtcaaaggagattattcctcacccttagatttaatgtctgccctcttgggtttcagacttgtttggggcctgttactcctttcttttggcctgtgtcttccttttctttctatatatatatatatatatatatatatatatatatatatattttaattatactttaagttctagggtacatgtgcacaatgtgcaggtttgttacatatgtatacatgtgccatgttggtgtcctgcacccagtaactcgtcatttacatcaggtatatctcctaatgctatccctcccccctccccccaccccaccacaggccccagtgtgtgatgttccccttcctgtgtccaagtgttctcattgttcaacttccacctatgagtgagaacatgccatgtttggtttttgtccttgcaatagtttgctgagaatgatggtttccagcttcatccatgtccctacaaaggacatgaactcatcattttttatgtctgcatagtattccatggtgtatatgtgccacattttcttaatccagtctatcattgttggacatttgggttggttccaagtctttgctattgtgaatagtgccgcaataaacatacgtgtgcatgtgtctgtactacaaggctacagtaactaaaacagcatggtactggtaccaaaacagagatacagaccaacggaacagaacagagccctcagaaataataccacacatctacaactatctgatctttgacaagcctgacaaaaacaagaaatggggaaaggattccctatttaataaatggtgctgggaaaactggctagccatatatagaaagctgaaactggatcccttccttacaccttatacaaaaattaattcgagatggattaaagacttaaatgttagacctaaaaccataaaaatcctagaagaaaacctaggcaataccattcaggacataggcatgggcaaggacttcatgtctaaaacaccaaaagcaatggcaataaaagccaaaattgacaaatgggatctaattaaactaaagagcttctgcacagcaaaagaaactaccatcagagtgaacaggcaacctaaagaatgggagaaaaattttgcaatctactcatctgacaaagggctaatatctagaatctacaaagaactcaaacaaatttacaagaaaaaaacaaccccatcaacaagtgggcgaaggatatgaacagacacttctcaaaagaagacatttatgaagccaacagacactgtgtcttccttttctaatggaaatgtctaccatatgcctgtataacaccactgtatcttgaatgtaggtagcttgttttgatatcatgagactatgaattttggacatttgggttggtgctggaacaagttaagaatttggggctatgatgtggaagaaatggatttttatgtgagaaggacatcagttttggagggccagaagcaatatactatggtttgaatattttcccatttcaaaactcatgttgaaatttaatctccaatgtggcagtattgagagaagaggcatttaagaggtgttgggtcatgagaacagagccctcatgaatggattaatacattcatcaattaatagatgaatgagttaatggattaatgggctatcatgggagtgggactggtggctttataagaagaggaagagagacctgagagagcacattcagccccctcaccatgtgaggccctgcaccaccttgggtctctacagagttctcagaaggctctcaccagatgtagccccttgaccttggacttctcaacctcagaactataaaaaatatattacttttctttataaattacccagtttcaagtgttctgatataaacaacagaaaataggctaatatatctatttaatgcataaaaagagacttgaaaacagaaatttataccatgtccctgagtaaaatattaaatgttgtaaaatgctaattttatcctaaataatctctaaatttgctattcttccaatcaaaatctcaacaggtaaaatctaaaactgtaaaactcttagaagaaagcagaaaagctttatgacattggatttggcaatgattgctgggttataataacactaaaagcacaagcaacaaaagtaaaaattagataaattggactacatcaacctttaaaactgtgcgtcaaggggacacaatcaacagagtaaaaaggcaatctatgaaatgggagaaaatactcttaaatcacgtatataaagtgattaatatccagaatatataagaaactcctacaactcaacaaaataacccagttaaaaaatagaaaaaagacttgaatagacacttttccagagaagatatacaaatggtcaacaagcacatgaaaagatgcccaacatcactaatcattagggaaatgcaaatcaaaaccacaaagagatgttacttcacaaccatcaggatggctactatcaaaaaagctaagtaagtgttggctaggatgtgaagaaattggaatccttgtgtatcattggtggaaatttaaaatgatgcagccactatggaaaacagcactgcagttcctcttaaaattagaaatagaattaccataagatccagcaactttactgcttggtatgcatccaaaagaattaaaaacagaatcaaagagatatttccaaacccatattatagaagcatttttcacaacagccaaaaggtggaggcaacctaagtgttcactgacaaatgaatggatcaacaaaatatggtatatacacacaatggaatattattcagccttaaaaagaaaaatcgtgtcatatgccacaacatagatgaatcttgagaacattatgctaagtgaaataagccagtcacaaaaagataaatattgtatgattccacttagttgaggtatctagagtagtcaaattcctagaaataaaaagtagaatggtggttgccattgacagatagggggaggaataaatagaaagttttgtttaatgggtacagagtttcagatttccataataaaaaaactttggagactgattagacaataacatgaatacaattaccactattgaactgtacactttaaaaatagttaatatggaaaattctatgttacgtgtatcttcacaattttttttaaagttcagtagggtaattatgcaaatgtaacatttaaaatcaatagaggaagctggattattcgataaatgatgctaggacaactgatcattaatttgggggtaggaaggaaccatagataaattataaatctgaaaataaataaaactatacgaagaaaataaggtaaaatattttataattgtggggctggtcaaggtcagcctaagcaagatacaaaatccagaagctttaagtaaatacacagatagaacacttcataaaaattaaaacttttacaccacaaaaaaaagataaataccaagaaacaggctggaaaaatacttttaaaatatttttaacagacaaagtctgttaaatatatttgatctagaatatacagtctagaatatagaattctgtttggtctagaatatacagtcaattcttgctttcacagtaattttattcaataaagccaccatgaacaccaagttagtaaatactaaatcattgctcctaagagaatgcaggtttagattcctggagcctctggtcacaatatttttatcaactgatcaatacaaaatcttgttttgtatatgcttctgtttaaagacaacttatttaacatatattgttgatttattaacattgaactcacagccatgagttccacaatataactcatacctcagtgaagcttatctgacacatagattttctccataagctacatcactagtgtttcttatgcctctagaaacactagaaagtacttcagcactacactggaggccattttaaacagtgaaatgcccaaggaaaaccagaaaattttttttaaaaaactggcactaaatagaatatgaaaaggacacttgtttcttgtttacagtatgagaactgaaacaagaaggcagagtgttgtcttgttcaacctcaactgggactcaactgggaacatgtgcaattttccactgctctgtgcacgtccatgaatgagaagaaccatgaaaacaaagaaccatttatgattacaaattttagcaaataagtgaatttccaaatatggcatccactagtaataagaatttaatgttttaaaatacacttcaaaatcaattctttgaaaaatataagaagtaaaaataatttgattcacatgagaaaaaatacaattgcctcaaaaatctaaagggaaacaaaagttccttctcactaataatcaggaaaatgtgacttcagtcaacagtgatgatgatggccgggtgtggtggctcacacctgtaatccttgcactttgggaggccaaggtgggtggatcatttgaggtcaggagttcaagatcagcctgaccaacatagtgaaaccctgtctctactaaaaatacaaaaaagaaaattagctgggcatgttggcacatgcctgtagtcccagctactcaggaggctgaggcaggagaatcactttaacctgggaggcggagtttgccaagatcgtgccactgcactccagcttgggcagcaaagtgagactccatctcagaaaatagtaataataataattgatacctctgatatggtttggctgtgtccccacccaaatctcatattggattatagttcccataatccccatgtgtgatggttaatactgaatgtcaactcgattggattgaaggatgcaaagtattgatcctgggtgtgtctgtgagggtgttgccaaaggagattaacatttgagtcagtgagctgggaaaggcagacccacccttaatctgggcaggcgcaatctaatcagctgccagtgcagctaggataaaagcaggcagaagaacgtgaaaagaatatgctggcttagcctcccagcctacatttttctttcatgctggatgcttcctgccctcaaacatcagacttcaagttcttcagctttgggattcagactggattccttgctcctcagcttgcagcctattgtggggccttgtgatcatgtgagtttaacactccttaataaactcccctttctatatatatataatatatatataatatatatatacacacacatacacatacacggagagagagagagagacataaagagagaaaaaaagagagagagatcctgttagttctgtccctctagacaaccctaatacaccatgtgtcatgggagggacctggtgggaggtaattaaatcacggggatggttacccccatcctgcttttctctgacagtgagtgagttctcatgagatctgatggtttataagggtatttttccccctttgcttggcacttctttctcctgctgccatgtgaagaagaacatatttgtttccctttctgccacgaactaatatagtaaattggtaacacagagagtgggggactgctataaagacacacgaaaatgtgaaagcgactttggaactgggtaaccggcagaggttggaacagtttcgagggcccagaagacaggaaaatgtgggaaagtctgcaacttcctagagacttgagggctcagaagacaggaagatatggggaagtttggagcttcctagagacttgctgaatggctttggtcaaaatgttgatagtgatggacaatgaagtccaggctgaggtgtctcagatggagatgaggaacttgttgggaactgcaataaaggtgattcttgctatgctttagcaaagagactggtagcattttgctcctgtcctagagatttgtagaactttgaatgtgagagagatgatttagggtatctggtggaagaaatttctaagcagcaaagcattcaagaggaaagagagcataaaagtttagaatatttgcagcctgacaatgtggtagaagagaaaaacccattttctggggagaaatcaagtgactgcagaaattcacataagtcacaaggaaccaaatgttaatcaccaagacaatggggaaaatgtcttcagggcatgtcagagacattcacagcagcccctccaatcacaggtcctgagacctaggagggaaaatacggtttcctgagctgggtccagggtcccccgtgctgcctcacaacttggcgccctgcatcccagccactccagccctggtctaaaaggtgccaaggtacagctcgggccatatcttcagagggtgcaagccccaagccttggtggcttccatgtggtgttggtcctgcaggtccaacagaagacaagaattgaggtttgggaacctttgcctagatttcagaggatgcatggaaatgcctggatgtccaggcagaagtttgctctaggggcagagtcctcatggagaacctctgatagggcagtgtgaaagggaaatgtggggttggagcccccaaacagagtccccactgggggactacctagtagagattgttttagaacttaaaggtttaatgactaccctattggatttcagacttgcacggggcctgtagcccctttgttttggccaatttctcccttttgaaacaggtgtatttacccagtatctgtatccccattgtatacaggaagtaactaacttgcttttgattttacaggctcataagcagaagaaacttgccttgtctcaggtaagactttggactgtggacttttgagtaaatgctgaaatgagttaagactttgggggactgctggaaaggcataattgatttgaaatgtgagaacatgatatttgggaggtaccaggggtggaatgatatggtttgcttgtgtccccaccaaaatctcatcgtggattttagttcccacaacccccacgtcatgggagggacccagttggaggcaattggatcagggacagttacccccatcctgctgttctcataatagtgaatgagttctcacgagatctgatggttttaaaaggggcatttccccctttgctcggcacttctttctcctgccgccatatgaaggatgtgtttgcttcccttcaatcttgattgtaagtttcctgaggcatccccagcccagcagagctgtgagtcaattgaacctctttcctttataaattacccagtcttgggcagttcttcatagcagagtgataacttactagaacaacctcttaacaaaaatggtcagataggctgggcatggtggctcacatctgtaatcccagcactttggtaggccaaggtgggcggactacctgaggtcagcagttcaagaccagcctggccaacacagtgaaaccccatctctactgaaaatacaaaaattagccaggagtggtggtgagcacctatcatcccagctacttgggaggccgaggcaggcgaattacttgaacccgggaggcagaggttgcagtgagccaagattgtgccactgcactccagcctgggtgagagagcaaaactccatctcaaaataaataaataacttaattaattaaaataaaataaaattagacaaaaacgatcatacaaacaattcatcccacactgtcttcagctgtccgtacttcatcctccttgtagagcaattttgatgattcaagacaagtgaatcaaaaatacctaaaatgatgttgctatggtttgagtgtccccccacaaaactcattttgaaatttaactgctattttaataatattaaaaggtgagactattaaaagataattagaccatgaggactttgccctcatgaatggataaatgtcattattcttggagtgtgtttgctatgaaaggatgagttcaaccgtctctcattctcttgacctctcttaccctctcaccttctgccttgggatgatgtaggaagaaagcccttgacagatgccagcaccctgatattagacttcccagccttcgaaactgtgagaagtaaatttcttttctttataaattatccagtcggtggtattctgttacagcagcacaaaatggactaagacaggtatggattgaaatgaaaaatgaacggatgagtgggtaggtagatggatggatgaatggatcaatggataaattggttgaatgagtaatgaatggacagatgcaagcaataacttgcaaactattctacaggaactcatggtgccataaggagtcattacgactttttacaacttatggcatttattttttcagaaaatataaaatctttattagaaaaattagatctgcttgtcataaataattcaaacaatgtttaagtatataaagcaggaagttaaagtctcccttgaatcttaagccttagaaataaccactatagctgtatactatacatacttccagattttctgagcacatacaaattaacattgcacatattagaatgcacttattatatgaagttgttttatactatacatactgccaatcctaccaaaactgacagagtgatgtctctgaaggccacaaacaaaacaatttttaaaaatgtgcgtttgtattgtaaataatttatagagaatcttgcatttatattgaaagagcttcataacaatcctacaaacaaacaggaactagcgtcctcattttaaagaagcagcagcagagggtgagttacttgcccaagattttatggccaacaaataatagtcaggccaattactttaactaaattataaagtttctcagagcagaaaccacacataattccagttttgtatcatttacagtacctggcacaaaattataaacaggtatgaggagggtatgatgtttatattgcttactgctctatgccacacatataacaaatggtcaataaacatctgtgaaacaaatggatggaaagatgtataaaagaagaggaaatgggaagagattctaaatgaactaagatacttatcaaaccatcattttttcaatttggacaataataaatacgtttagcagctcatccactccgtaagcataatacaacatgataaccaatatcattgatatcaatatcaaaatgatatcaattgaatatactctagataagagtgacatcaacaattactgatttcctctttaacagtgaaatgccatagtaaaaaatattgaacagtagacactatacacccttattgttgctaaaagaagctattccgtctatttttttaattttatatcaaatattcacatggaatttggctcaaacacaatagatatgcaaactataaaagtataaatagtccatagggactatgggaaagtataaatagtccatagaattactgtgaaatataagtgagacaaggaacgttaagtgcttatcactgcacttggaatgtggtaggtactcaataagtgttagatatcattattaacatcactattaacatcatcatcataaggctttcctaaaatgattaaaaaattgaggctttccaaaggcaaaattatagttcatttattttaaaagttataaaaataactgcacaaaacaataaaaatctagatcacacaaatgcttgacaggaaagctgaaatgcatttttctgtaaaataaatatatgtcccatcttctgcctagatgcagactacaggcatattctccttgagtgcatctatgagagatgaaatgtctactgacctaatttctgtagctattgtatctgtttcttacagccactgtaacaaaccgccacaaacttagtattatagcttaaaataacaaaatatgttttctgacagttattgggatcaaaagtttaaaagacatttcacagggctaaaattaaggtgttagcagggctggttacttctggaggctctaaaagagaatctagggggcatggtggcttatgtctgtaattccagcactttgggaggccgaggcaggtgaatcacctgaggtcaggagttcaagacaagacaggccaacatggtgaaaccccatctctactaaaaatacaaaaaattagctgggcgtggtgatgcatgcctgtaatcccagctactcaggaggctgaggcaggagaactgcttgaacccaggaggcagaggttgcagtgagccaggatggcaacagagcaagacaacatctcaaataagtaaatttataaataaataaaaataaaagagaatctgttccctgcctttttcaacttcaaggggccacctgtattccttggctcatagcctcttcctccatcttcaaagctagcaatgtaacatcttcaaatctctgctttcctcatcatatcacactataagtaccttcataattacattgggcacacattgataatccaggataatccccccccatcataagatcctttagttaacaatatatgtcccttttgtcatatacagtaacatattcataggctctacatactagaatttagacatttggggaggagcattatgctgtctttatcacagtacatcctctggacaccaaataatcacattcttccacatataaaatccattcatgccatctcaacgtcccataaatcttaacccattacacaacatcaacttaaactcaaaatctcaaaaactcaaaagtcccaaatttcctcatataaatcaagcatgagtcagacgcatctgtgaatctgtgaaactggaataaaaagttattcgctcctaaaattcaatgatatgacaagtgtagcgaaacaattatagatatccccaaccaaagagagagaaatgaaaaataaaaagtgagtcaacagtccgaagcaattcagaactgcaactgggcaaactccattaggtttcaagccctgggaataatcctttggagttctcagctctaccctctcgggcctcagtcccatcctctgagtcctcctttctattccataaaggttaacttatgtttgcaaactcagtagtttcataagcctatttcctgcctgcagaatttcaggaatccaacagccttctttcattttatcctctgtccctttaagtccaagctaccaaagtctccgctaataaaccattcatgaaaacactgtgggtctcccaggtatgtcacaagaatttcctggataatcccaactctgaatcccatctcagcgtaattcatctcatcataattcagatctgctcaatctcttcaaagagccctctgtgtggttgaataatctcagtttttgatcctcctgaggcactagaaacaagttatctagccatgctttcagctttctctctaagtacacttcttgacagtgaatctaaaaatttcagtgttttttgcaatctggatagattgagaatgttccaaccatcaagtcctggtttctttgagtttaaatgttcttctcacaatttatctctttcctcctcccacatttcagtataggcaacaagaggaaaccaggccatacctccaacactttatctagaaatctactcagcaaaatatccaagttcatcacctactagatctgctttgcacataaccatagaatataattcctctagactatctgctattatatagcaagtatctcctttcctccagttttcaataacatgtttcctatttatttctgagtccttatcagaagcacctttaacattcatatgtttattaacattctctctacaatgatttaggtattctctaagatcatacaagttctctctaccatttcccccgctttcttctgaaccctcacagtagtgactttaacatcctcgtttgtataaacattatgtttatgacaattaggtaatctctaagaaaatacaggttttctctaccatatcacttctttctgagcccttattagcggcatctttaatgtccatatttctgttcaaggcaatctaagctctttacatcatgctcctcaaaattcttctagcttctacccagtgcccaattccaaagccatttctatatttttatgcacctgttacagcagcactccacttccaggtaccaaaatgtggaatagtttcctagggctaccattacaaattaccacaaacttagttgcttataacaacacaaatttattctctcatagttctcaaggtcaaagtctaaaatgattctctctgggctaaagttaaggtattggcagggctatctccttctggaggctcacagggagaatccacttcctgttttttcagcttccagaggcctcttgcattcctttggtccatggctgcaccactctgacctctacttccatcatcacatatcttctgactctgaccctgctgcctttctcttacaaagaccactgtgattacaccggacccccaacgtaatccagataacacccccaattcagatcctaaactgaatcacatctgcaaagttcctctgccacataaggtaatatattcacaggttgtgaagattataatgtaaatatcttttgggggaattattctgtaaaccacagccatgttcattattaactgatttctgtttaaaatacttaacccatattttcaattacatagttttaagcactaacaccgctgattgcctatcttactgaactaatatcttgccatttcctcatttcaaacgttggttcttttaaaagttttgggaagacgaaatttagcaagagaataaaatcatatattgaattaaacaattcccagagcagttatacgaataatatctcgattcattgttatggttcagagtatctccaaagtatgtagtagttttgttgttgggagagagggggaaagctaaagccctatcacaaaaccgtaactattctggagttgaaagatagctcaggggtcatctccatttcaaggctgagaaaaataaggcccagagaggttaaattattaacccaatgacataaactccaacagagaggagagagtatataaatttattttaatatatctagtgactaactatatagaaatctgatttaacagcaaccacacagaaagctgctgcattttcataaaaggaatttcttaatctcaagttcaggtagttttttatttagctatctgagcttctcaagtcttgaggcaaatgctaaaaaggtagttttctaaacagctagaggaatttcagacaaaccccatcaaattcataaaaataggtatttgccagaatgctacataggatggttatcaagccaaatgaaagaggttccaccgttgtcagtctactgactggtgtggaaaatccaaacatctataggctctataagtaatgtagtttctggcttccttggagaccagcgctctaatggaactctaagacaaatatcttgtcatatatgtgtatagcaaaaaagtacttttaagaaaatcagtaaaaaaaaaaaaaaaaggcacttaaattaaattttgctgtgtccaatactaccaatcctgttatcccttatgaaaaacatcagaaccacttggacacttttaaaacgttattttactaaatgtgtatttggtttcttggttttgccaattacaagataagtaacatagacttgaagtggaagttaagatataaagactttaggaagggcagtaaaaagtgctattgatatgtgaataggcatctcaataaataaaataaaaatactccaagtatccaaaataatcaaacatttcaatatgaaaggaagaaattatgtttgcattgacttatgcaactaaagactcaagtgggctgggcacggtggctcacacctgtaatcccagcacttggggggccaaggcgggcgaatcacgaggtcaggagttcgagaccagcctgagcaatatggtgaaaccccatctctactaaaaatacaaattagccgggcgtggtggcacacgcctgtagtcccagctactaggaaagctgatgcaggagaatcacttgaacccaggaggcggaggttgcagtgagccaagatcacgccactgattccagcccgggtgacagagtgagactccatctcaaaaaaaaaaaaaaaaaaaaaaaaaaagactcaactatggctatggctctgtgtgtgtgtgtgtgtttgtgttcacatgggttatcatgtgtactgtcatttcaataaagatattataatcttattgaattgaaaatatttgcaatacctagcaaaattctttacagcttttttttttctcaatacaatctgatggtaaagaatagagcataaatgtgatgtttaaggctcttttcattccatagccagggtatgaatgtctaggtaaaactcaaaaattgcatcaacagtttgagggtgagtcaaaacataaaatttatcatggctatagaaacagaaaaaaaaaaatacattgccaataaaatagttatttcccctggtaacagaaataaatttcctaataaaaatagaagttaaaaagaaaatgaaaattatacctaagcactttaaacatttcactgaacataattccatatccacaaacacatacacgtggtcttacataaattgaatctcacctatactatgagtttgaaatcagtttttctcttattctttaagaaaaaaaaaggtcagggatatcttttcatgtcaataaataggaaaactacgtaatcatttttagggctgcagactgtcccgtcacagaagctccataatttatttaagcaatcccctattgtaagacactaatgctgtttataattttttactctacaacaaacattgataaacatcctgtaccaatctgtttaccaatttatccaattctctctttaaaataaatgtctacaactagaggagctggataaatgagtatacagagaatgtatattaaactcttgccttgcacagaaaatttacctctaacccttttgaaagcaatttgccagaatgcattaaggtccctagatggtaggttggtggcggggtagtggtctgctgagctgtggagggcggtggggctgagggtggggtggagagggcggtgcccctgctctgaggcagggactactgggtgacagagacaaaggggtgtgtgatggggcaggtcacaatgggtaggggaggataaaagtggtcctgcggggtggtttagcagcagtggatggttcaggttgggaagaagagcagtgggattgccagttaaggttgtggaatcaaagagcaaaggctgttgtgaagtggaatatcaggctcaaatggaggtccctcccgaatgagcactgacacctgtgtgcccggacatccacgagggccccaacacctgtgctcctgacagctccatgcactaagcagggcacagtctggatccaggggactgactgtctctggcattgagcggttggtaatcaataccccaccctccctgttctcagtcacttggggacaaaaaagaaagcctgcagaacacgactgctggcccacctgccagagtagccaaggaaacaggatgcccgctaaagcatgttaaggaaggtgtggagcagctgctgggaactgtcttgatttaaaggaagacatggaggactgctgtatgctaccgtattacacggcccaaagcagccccgcaatgggcatgtttaacacctccatggggaagctgcagcggcaactgtacaaaggcgagtatactatattcaggtatgcacccatgtttgagagcgactttatccagatcagcaaaagaggagaagtgattgacgtgcacaaccgtgcccgaatggtaacaatgggcatcgttcgcaccagcccctgcctcacactacctgatgtcatgctgctggcccgaccagctgctgtctgtgacaatgccaggtgtggtcctgccacccagaaaagagaaagtccgcctgcagagatcttagaactaaccaggctgcttcccttgatgtttgtgaaaataaccatccacaacagcgtaaaaaaacagctccacctgaagcttgccacgggccgctctttttatcttcagctgtgtcctccatcggatgcaagtgaagacctttttgttcactgggaaaaccttgtttacatcctgagaccaccagtggaggcttacagtgataccagggctatcctagctgggaacacattggactcatctgtgttggaggaagtgcagaggagcccagtggtgagtctatgcagagactagatggggcctggatgctttgggggagagcaggtacaggtcctgtaaagcctttggtgctgcagctcacctgggaaatgcattgcatttggaaggtctgaaggccaaatgagcttccatttggaggccatggtacattgaggaggttcctagtgcttctccagggttctccaagcctgaatttcagagatttcttagctgtcagcaactcttcattttatatccacagctgttcattttatatcaatgttgtaatgctgtccaaagcatcctgaccagtctattctgaaacacatactatgacctaggcaggctgatatgttgtaggacgtgtctccctgcaattgccacttatatacattggtggcaacacaacatgtttgtgtacttgtgcaataatttctttttgttgtttacctataggaagagaaaggagatcttgctggtctcactgtctttgcttatttgttctctccctagggatatgccatgaagttttgtgaagagaaggagcaattcagaatcagtagacttcacatgaatgctgaaatgtttgggtccacctattgtgattatacaatagagatatgaatccaacatacctcccacatatactacgttcaagagttcacacacccctgcagtcataaaacctatagtgcctgatgaaggggcagggtagcaacagcagtagtgatgacagtaagcaccaccacaggtaccatggatgtggctgcaaccaagtctgcagactcaggagagaaacacagcactggcaaaagcagccttcagaggtccaggaggaagtatagccagcatggctattagtgggtgcttccatgtcttaatcttgttatagcaagggctgcatgcacattcttgtcctaaaagggtacttcaagcatatcagtaagtgctactggcctctccctagagagcagtatgaatgtggtggctacaggagcagagagatactgagaaggctgttgcattgacagtatctctctgctactcaaaggctgactctctgctactcagcattgggagtcagttatctcaactctgcaggatgaggccacatgcgtgaatgggatggaagccagagggtctctacctagctggattgactctgcagtaataacctcaaagcccagtactacacatggtgcagaggtggacatctcacctaagactgtggaggggaacaatgtgattcaccataataaaatccatcaactcaaattatctgctctaataacatatgctctattgacaggaagggtagcaataaaactaatggcaatttatgatcaggctctgaaaactatctttaactttcccttaactttatattttttaaataaattaatagatgacagaataaaatgttgaagattactctcagatatgatcctacattaggagaattattctaaaactgttttccaaaatataaaatgagaacccaggaatacacacacacagactctctctctctctcctctctctctccaggtttgaatcacagcattgccacacattaactgtgagtttcagtagattgtttctttaaatggtcaccttgagaccatacatgtataatatctggaacatagtaggcactgtgtaaatggtagtgttgagaaacaaattctgagtttaatcatactttccagaaagggcttaattttcccagtctcttcattcttgatttcctttcttaaatcttaattaactgctttgcaattgtcccataaaagctctatttacagtaaatcttctcagtatcttccaagaattttaatcccctgacgctatttagaattctaaattttcatgaatttgtagaaatttcaatctagttacaatggaaagataattgcaaagcactcatcttttacctggttctctccaattttagtattcttggagatagaaaaataaaatgtaatataggatcaattcataatctggacaaaaactggaaattagatcattttagaattgtaagatccacatccatgggattagccaatattctaattttgcaagtaaaaagtctgctcgagtctaaagtaatacatcacatggtttgagaaccagaatgtataggtaacctggcccccaattatgtctgtattgtttccataacactcatgattctgacaagcactgtgctttgaatataaaagatatttgatacatgtttgctggatccaattaagggctataaatgtgaaatataatttattccaatcaaacaaatctggggatataaaattttacatagtactgtactaattgtacagatcccaaaggcccctgtatatattgtaaggaagcagtttaccagtagaccctcacagcgcttacgacttaatgatttttaatggcctccaaaagtgcttcagacctgaaaaaaatggtttcaaaatatgaaaaacatttcacaggttagatgttctagctttgcgaatttcaaggttacattactgagaaatcacatctaaccataaatcacttttcagcaaataatttcaaatgaaaaaatttaaaaataaaacaatttttgtttttcatgtggtacgtagcccagtatcatatgatactggagaccccctaagaagctttaaaatgaccatattgcaaactcttaacagagaccaactttatctttatattcaaggactgtcagcatgcttaccacattgtagtcccttgataatcatagaagggatcattgttaaaagcactgcacattttgtattttttctctaaatcttaatctgactcaatctctttttaaattgtatattcctttggtaaatatttcaatctgcttctgattacaaatcctgatgcttattactatcagatcctgttcctaggtcacagttttcttaaaattctaaaacaatacatatcctgttacctcatctcttgtaatcaaagtttaagagataatttagataatagatactgataataacagaaaaagatttaaaaattaccatttgtgaatggttgagaatggttgaatcctaggtaataaactaaaaaaccagatgaattaaaaaatgttgcaaattgtgtatgtgtgtatgtgtatatactatatatatgtacaaatatactatatatacacaaaaatatgctatacatattatatttttaattgcaaaacttcaaaaattctttaatatattttgcaatgaaaatgtatatatataaacatgttatatatacataaaacatgtttacatgtgtatatatatatatacacacacatatacacacacaaatataaatgctaaaggatagcccttaaacaataatattcacagacacacacacacacacattcttaagaatttatagtgagaggctgggtgcagtggctcacgcctgtaataccagcactttgggaagccgaggcgggcagatcacttgaggccaggagtttgagatgagattggccaatattgtgaaatgccgtctctactaaaaacacaaaaattagccaagcatagtggcgcacccctgtaatcccagctactcaggaagctgaggcaggagaatcgcttgaaccagggaggcagaggttgcagtgatccaagatcgtaccactgcactccagcctgggaaacagagcgagactccatctgaaaaaaaaagaaaaatttatagtgagagaaacattagtaaaatagtcttattgctggtttgttagattaaattcagttaaaaaaaaacacccaaaacctgtatctcaagtacatttatagatttaatgcagtaaaaattaaaatcccaatagagatactttttaaactcaacatagtacttacaaaatacagattttataaagcaagcaatcaagtcagctgctagttttaatttaataatggataataccaacactgagtcatgtggtttaaaaaataggaaggcagaaataaacaagccttcagaagtaaaaccaaaacaaaaggataaaaacgagaggaatatgagttattgttcaatggaaagtcataggaaaactagatatcaacaagcaaaaaataatatagagccataattgaaatttatgttaaaaggagttctaaataagatgaattaaatgaaaaataggattgagaagcttaatcaactggatagtttttttaaattacatgatgcacttgtacacatacaaattaagacaaaaagaaaagctgcagactgggaaagattttgtggtaaatgtaactagaacatctgaggaattaataaacttattgaacaataccagtcttcaccaaggaaatggccaaaggtaaagcaaacctaatattaaaaattgtagaccaaaagcaaggtactaccaagcctaaaaaataataaaatcaaatttagaaaaaagcaaatgttagtaaggtggtagaaaatcagatacaatcatattactgacagctttttgatttgcagtcatctggctaatatagtaaataccctgattattttatttcagtaattatttttaagatataaggcaaagtaatgattaggaaatgtatttttacaaatgcagttttatgaggggaaaataggttaaaacatttaattattgataaactgctaagcagttaagggtaagctaataaaatacaacttatgcttgttaattttctttccctttacccatgtagatatgaggtaaaaaactatatgtaaaaactttaagtgaagacatgacaccctagaatatacacatttgttcactgagattcattcaactattacttcattccaattatttttttttgttttacatccatcagattttgcttgataaagaagacatttttttctcttcctttctttctttctttttttttttttttttttgagacagagtctcactctatcataacccaggctggaatgcagtggtatgatcacagctcaatgcagcctcaacctcccatctcagcctcctgagtagctagggctatgggtgtgtactaccacacctggcttatttttgtattttttgtagagacaaggtctcactatgttgcccaggctggtcttgaacttctgggctcaagcaatccaccctcctcggcctcccacagtgctgagattacaggtgtgagataccacatcgaacccattcttctgatttgccaggaactacgcgttagactgcagatgctgagcatcaaaaggttgaatctctacctttatggagctcacagtttagtatgtatttacaacaattctgtaaaggttacagtaaactgtcttaaagtcctatgaagagattttttaagtactatatactgatttgaatatcctacttagctttctacaacaaattaatattgaaatttgaggggctatgatcaaattatgatacagacatgtggaagacgtgatggtttcttagacataattgtttcgtatttgtcgtgacagaagggaaaatatctttgagatgtaacacttttctggataagtactgtgatttatcttctgtcctggactgctttttccacccacgttctatgtaattaacctcttaacattataccctttcatattaagttctttgcttattgtgcagagatattttcaccatggcttcaaatttcctatctctggaatattttagtcatttctgaaactcctctaagagtgtatggttcacaacccacaacaggaacctgaaggtgatactacagatttaaagtagtcttaatgatagtgaaatgacttgaaactaatagtcaatattttagtgttctggtttcatttttggattttattccaaaacctccagaagtacacattcccattattctacaatgctccattgtgatgtgaaaaatataatcactggctatgcttttaaacagccataatatgtttccttatatctgtagacaacttttactttttaaaaatagcattctttaaactgatatatttctggattcaaaatattaaaacctcataaacaagataacttttctgcattataaccaaactaaataatactaattttttacataaattatgtcttcgcatatgtacacatatgcacaccaagttatatgcacattttacttgacactttgagaaaaaccacaagatccaaaatcacaaagtgaacaagatcctaatttgattttcgaaggggagggagattttatcttaaaaacataggcaaccatttttgttttattgtaccttaataaaagcaaacttttacctgggcaagcatggggaagccaaggttcctacatccattacacggagttaatgcttcccaaagtcctgatggcccacacgtattttcatcatcatcctcttcttccacttctcctggtgacaaattgattgtagatgaggttctctgaaattaaatttatatcataccaatatattatatcaatgatatttagatatcttaacatcaattaaattctataaatgacagtggtatatctcggcaaacaagtcagctcacttttagccacagttacatggctgtgccctgtgcctgagataaaaatatgtatagtccaacttaagttaaaagtgaaaaaaactaggtgtgaaagacttataaaataatatatgaagttcataatgaagaatagaacatgataatggcctaataaaatatttgaatagcaacaaatgagaaaaatcttatggtttatcaagaatttaggtttaggcataaaattaaggaaaaatgcagttagggcactaacaggaaaatattttattgaaatgggaactcctgataaaccagtttgttcagaatgccactgaaataaaactttataaactttcatatcatacatataacaggagtaacagttttaaaattcataatgagacttccatatttagcacatatattttccttcgttatctcccaaatctcactaaaatgatggtagaacatttataaaaatgtttacaccataaaaataaggatgacaggagagatgaacagacaatattaagaaaacttctggataatgttgagtaacttttggataacagatgggtattacctgacttagcaaacatgagaacactgaaagcaaagaaccttcatgtggaaagaattggagggactggctacctgtgaaggtgtaagtgtaggtggggcagaaacagactgaaactcagtatcagaaagaattatacccctagacccatctccttttcacccagccaggaaactaaatctttaccactggcaagaaattagaggtttaatttttgaagaagttgaagcaaaaggattatgaattctaagactacagatatactgagtctccaaaaacaagagaattaatatctatatagtaatgaagattcataacctaccccgtgccttaccatatttgcattagacaacatggcagcacggtttatattcccagataaacaactagaatactcctccctgtagaaacagacctcctaagaaaaaaggtctataaataagcaggaaaatggtgggatctatgtatcaatctctactgtgaagccaacctctcaacaagttccactcacaagaatcatatatttgagaaaaacctcttaacagacaccaaaataaatatagagaaaaaagttataaatagtatcctcagagagaagatatttatagccatgaaacaagaacagaaagttacaaaatacataaaatccaatacaagagtaagaaaaatctgagaaaatttcccaaaagatgaacagaatttaaaagtggagaaaactaggggtcaaaccaagacctctaacatctgaacaaaaggagctccaaaaattaagagtagagatgggagggtcaaagaaataaagcatgaaaatttgcagaaactgaggaaaaacttcactctaagagcctgctgaatacttagcagactcaatttaaaaaaaaagatgtatatgcataaataaaaagaaatacactaaattgtctaaaggtcctctgaatgtagcgttcagcacaacattgatagatcatgattactaaagcaagtaaatatattctacatattggattgtaaatagcatcctccccccaaaattgttccttttaaaaatagaatataagattttatttttcctcctatttaaaagaatttgttttctgcattcacattttaacttccccttgatcacttgtcagtaactaagaagcaatgaaattaagttgtcccccaatcagttgctgtctataaaatacaataataataacaactgttagactgagaacttactatgtgacttggagtatcactggcctattgtctgttaactattttaattcacacaacagccatttgaggcaaatatttttcctctcactttataaatgaggaaactaagggacagagaggccaagtaaaacccaaggtcacgaagctggcaagtggcagaaaaaggattctaacccagactagggggctgcaaaacctactctcccctcaccactacattctgtgaccactcctttggtacaataacctgtggaagacaatatactgaaaaaccacactgatgtaaataattgcagtttaaataaaagaggtatatttggtgaatacgtttctgttacacgagtaaagtcctgagagcattttgccttctgtgacagggagtgaaaatttctgcaatttgatacatagcagcccatgctttcataaatacacacttctcaaatcaataatagaaggtgattatcacagggatttttgaccctacagatcctttgagtaaaataaaaaatcttgggaaatttaaaatcttaatctgaaagagtatatatatatatatgataaagttgttcacaggaataaataaaatgatcaaaaaggtatctcctttaccagctcatgatcagctaacagtttgaccatcaacattgatgcggcacatactataaaccacctcatagttggccaagaattatcaacattttagattaatccattcttttctattttgttaatggtgctacaatgatttaatccaatcacacagggaacttcctctatctctttctcctccctcaaaaaaaaaaaaaaaaaaaaaaaaagcttatctctcttccctgctcataaagctccaattacttcccatttcacagcaaatgatatccaaattccttaatctggcttcagagttctatagtcaaatgattttttagcccttttactttttcactatactcacctcagattataaccaggtggaattgtttacccttgcctaatcatgctctatgcttttattctttctttcaccttacttgtctgcacagcgtattgtagtggttaagggcttgggctctaaaattagacagtcctgaattcaagttccaaatacccgcctcactagccgtatgattttcagcagataagaccattgtcagcctctcttgccttatctatgcaatggaaaacaatacagtggaacctctctcagggctttttcctgatgactaaatgaggtaataaatataaagtgcctgacacatacagcttcaataagtattaactatcatgtttattattttcttataatcccactgattcaaaatagagttcagatttcatcccttacctaaaattttccagatttcccacaagcatgcatgatatcatgttcttctgcttgtctctctttgtgcaaatgtttgcatttggtatttcacattcaccttgagttgatagatgctatagtggcaaagagcattggcttttaactcaaacagatatatgtttaaatcctagctctaccacttccaagctttgtgattttgagcaaatcacataatcttattaatccttagtttccctatctgaaaaaatagtgtaatcatttccacttgcagggctgtatgaagatcaaattaattgcttgacagagactggcacataaaaaatcaataagtactgctattttattttttaccataaaagagttgtgtacacacacacagtgtgcttgtgcaaatatactacacagacacaagtgtggcttatttacccttgtgaagtaagttatttgaaagaaaacattgccttattcacattgtatctcctacaatgtgttgtgcataatgaaacaataaatatttattgaatgaatcactgaataaatgagcttcaaattattattttcatttgactacctagaaaattttactaatattaaggggtgtgtataattgtatcacaaatatcaagattgccattttagctttattttatattaactattacaagtagctttgcagaaatgaagaaacttatcagtggtttagcactgccccctaaagacagcatataaattggctgtgtaaaaccataatttttaacttcatttctttacagttaaagatttgaaggaaaatattttatcaagctacatataatcttcaattatatatgggaagaagccagcggaacacacttaacctcagatggtttcatttattccaaatgctgttcaaactttttactggagaacaaactctgttcctgaagttccagaaagatgtgaaaattctactataaaaaaaaatagacctaaatctatacagtttgaacccattagctttcttggttattacacggtaataaagaaagactggaccaattctatgttgttgcaaattgaaaaacagtcacaataatatactgtagggagacaaacttgagctcaatcaaagaaaaacacttttgagaataattatattagtctaacattgaagaaatgggatttccctgtgaggcagtgtgtgttcgtgtgtgtttgtgtgtctgtgtgtgtgcatgtgtgtatgtgtaaattatatgacaactatatataacggtgcttcataatttataaaatgctttcagatagagaatagcccaataaaatagagtaagaattatccctattttacaagtgaaaaaaactgatgctcaaaatgttactcgatttgcaagatcatactacaaatcagtccagattataatccaagccctctaaatctaggtcctattgtctttctaccacaccatggaagccacctccttaattactagaactcttcaaggggacaacaaatgttcaagattgtcaatgcaaagggaccaggccaaaaggcagaatccaggaaagaggcaatatcagagatggcaatcaaagcaaaaggcaacaatctggaatgagttagcaatctagactactttatagcattgccacacgcctttttgcctttgtttagttctaaagtaaaattgctttatagatttttcaatgaaatttaaagtaatacatgcttattgtaaaacaaatcattcataatgaaaaattatacatgaaagagtgaagctttcctagcctcggtcccacattcagtgggtgtacttccagactttgtaatacttactctacttgcctgatgactttctcacgataaattcataaatgagaaattgtatacaccaaagagtatgcctacctttatctttctttttctttttcttttttttttttttttttgaggtggagtctcactctgttgtccaggctgcagtgcagtggcacaatctctgctcactgcagcctccacctcccaggttcaagtgattctcctgcctcagcctcccaagtagctgggattagaggtgcccaccatcacacctaattttttgtatttttttagtagagatggggtttcaccatgttggccaagctggtcttgaactcctgacttcaggtgatccacctgccttggcctcccaatgtgctgagattacaagcatgggccaccgtgcctggcctaaactttctaagtattgccaatgttgtctttaacctgttcacagtgatcagagaaatgttttttcatatgagaatgtgatcatgttttcctcttccttaaaaccttcaatagcttttcatgttcttctgataaagttcaaaattcttaatatgatccaaaaggctatgcatgatctgcccctacctccctctgtatcccaccactaatctggcaggccaggtctcactaacagctgaacaggaaggcctccatgacaactgtttcagcactgactgagtggttaaattaaatatttaaagctgatagagccagtgcccttatacgaaggctggaatgtaacgaaagcccaccaagagttttgcctaggcctttccagggccttgaagcatgatgaaataacaaaggaattcttaacagaacccgtttagtattaaacaggttttactgggggtctgaaggaactccccagacctccacaaacaagttttattgaggtctaaaggaactcccaaatcttcatgatttagcaggagacaagataagcgtaatcacccctggcacctggatccatctagattgagtaaatttactgaagctccagaggaaggtcttcaggactcagaccttaggtatagatgagaagaagttaatcacttatgtctttagatgaatgcacacttacatgtagacatacagcttagaaggtatataagctctggaaaactttgtaattttgagttggtctggcaatattttccctggccttctccctgtacccgtttacagaagtaaattctcttctttcccagttggtctgcatcttgttattggaccatgagaataagcaacccgacccttggtttggtccaggaacactaacactattcctctcctttgcccataatgtttaaacacactgagcttccctctttccctcaagtataccaaacttcctcttgcctcgtaccttaccttagcacatgtggttttctctggcaaagactattagtcatctcccaatatacagtcccccctcctccttttgtctttagtaacaccttcttttattcttgtatggtactaatactccaacttttagctgggcacatgtattctttgaataaataccacattgtccagtgtctgttgcagctaggtgtgaccacatggctaagtcataaccatgggatataagaagtgctcttgaagtgaataggtgtgcccttcttcctccccttcctcttcctgctgattgaatgctaatgaaatagctggagctggagcatttgtcctgggccatgaagtatccttggaactagaggacctgcacaatggaacaacaaaatagaagaatcctgggttcctcatagaggtgatccctaccagccttggactgcctagctctaagctttagaagtgggagtaaaacaaactctttctctttaagccattattattattttagatgtttttgttatttgctattgtgtcaaaccctaacaaataaattcctttgcttgtcttcatcaggattaatcttattggtgctttaggtataaatataattcacttcctttggaaggccttcttgatgctctcatcaagattaatttcctttcttatatgccttcacagtatcctgcttttctaatagcaattatcacaatgataattttatagttactgtgtgactttggttcagtatctcctatccttagtccataaaagctgcatgattgcagagatgcctgttgggttagctaccaaagcctgatacttggctagtacattgaataacagtttatcacatatgtgttgaaaatgaatgaagagtaaatgaatgaatgaatgccagcttgccctcatagatgttttattagtgtgaacattttcactagttctaagaggaaccaatgtaactataacccagattttaatgtcctttgttctctaactccatttgctcccactgtcttccttccatattcaaaataatgtagaaaacagcatctatttgatttcatgaaagaatacatttatgacaaccattggtgcacaatttacattttaccacaaactctatagcggaggtgaatgggctttaaattgcacagcttaactcctccccctcccctatcaatatttttctccttatagtaataattgggtagaagggtgcttttcatctccccttccaccaagaagaatagaattcttggtgtctatttttgcctgcagactgttttcattagctctttaaattcttctcctctttattatgcaagcaatttcacactaggatacatcttatctgcaaatttgcatagccaatctcattacacaagagatcttacatgagaactattattttgtcaatttaaaaggcaacaactatgtaatagcatgatatatcatattttcctttttacaatcttttaaaaccggggatctaagggcttaatggggcactaagaagaaaacgtgaggtgttaagctggtttacttattccaaagctatgatagtattaatgatcagatagatgataggtcagtgatcatattactcacaaaggaacagactcaaccatcttaaatttagtcctgggagagatatcacatgccacagttgaatatattagcaatgatcagaaaacctactgttaaagccacagttgaacatattagctatgatcagaaaccctactgttaaatacgtttctataagcttagtaacactaaacatctgttcaaaattttctgaaaattaccttgcaaggctaccctacactacctttcaccacaaccatttgttccatgttagtaaaattcacaaaagctgcaacatttaagtctgctgaaaaataaaatttctctaagattaatttggagttagctgtgaatcctgtactgcatttatatctgcaaggaaaagaaaggaagaagaaaaacaagtcttgatgccaatgagtacactgagtacatctcctagtatctgcactctgaaatgacgttactatgtatggtgatattttaaacttgaggatttgccagtgccaaatgtatttcacatttattgaaggacagaattgctattaaagcaattgttttagttgcaagaaatattgaacaagaaagtaaggatagtctttctctttttaatagtacatgagacattacaattcctctgaaacgcttagttccaacacattatgttcctgcctgctgtttacatatttgacatcctttgcataacatcaggaaacttcaaagaacatattttgtttgctattctacttatatacaatcaatttgaacgtttttattatctctcaaaacttttgttcatttatctgacccttacctagtaattaatactgtttattatttcaatattagaaagagctaagtctaaactgatgccaattttatgcacaatacgcagaagctaatttcaaaaaaaaatgttaaagtcaccttagaaagtttaaactttttttttttcaacaagacagtacagaaggcaaaatgtataactttgggaaaactaaattatcctccatgacagatcattttatatgaacaaataacatttttctaaaagtttacttctttgttttaaaataaaattcattaaagtcttatttatatacctaacatgaacccattttatatatttattttttgtattggtacaaatctttaatagaatttttatttaaataggggattcttatgttactttaatgcaaaatagaaagaaaacaaatgaaattttatataaaaattaaaaacctaagagtaaaaaggtagatgtatgtagaatcctccacagtcagcgtacagtatggcattttcaaaaagctgagggaaaaggagcaagaaactgagaaggaagcaaaggagaagaaaggggagagtaaagaaagaaagaaaagatgacatgcacccattttaaatgtacatacctgtgcattcaccaccacaatcaagatacagaacatttccatcaccgcaaaaggttaccttgaatccctttcctatcaatatttccctactggtagccccagaaatcttttttctgccacaatatagtagcatatacactttatgtttggcataagttttctgtaaagcttattaacactaaacatctgtttaaaattttctgaaaattaccttgcaaggctaccctgcactatcttttcaccacaaccatttgttccacgttagtaaaattcactcagcctaatgtttttgagattcattcctacttttgcatatcagtagtttattcctttttaatccaaagtaatattccattgtatggctataccaaagttttgtttatacattcatctatttatgggcatttggttgttttcagcttgcggccattacgaataaagtcgccattaacattcacattaaaatctgtgagtgcccataagtttttgtttctcttgggtaaatatcgaaaatgctaggtcacacggtaaatgcatcaaactttttaagaaactgctaaagtgttttccaaagtgtttgtaccattttacattcccattcattgtgtcggagagtttcggtagctccacattcttggcaacacttaattttagttattctaatgggtatgcatgtagagttatcgcaatagtatgtagttatcaaatggtatgtagaattatcacaataatagtacttttaatatacatttctgccagtgctactaatgtgctaaatatcttctcctgtgcttagaggccatttaccttcttctttggtgaagtacctttacacatttttattaggttgttcgacttctttttttttttttagacggagtatcactctgttgcccaggctggatggagtgcagtggcaccatctcggctcactgcaagctctgcctcccaggctcacgccattctcctgcctcagcctcccaagtagctgggactacaggcgcccaccaccacgcccggctaattttttgtatttttagtagagacggggtttcaccgtgttaaccaggatggtctcgatctcctgaccttgtgatccgcccgcctcagcctcccaaagtgctgcgattacaaccttagcgtgagccaagtttctttgacttcttattgctgtgttgtaagagtattctttttaaatattctatattctagacatacctcctttgtactgttggtgaatatataagaaatctttgcctaacacaaagttaagatattttcctatattttcttccataagtttaagatttttgcttttacattttgatctttgttctatattgagttaattttcatgtacagcatgaggtaaaggttgagatttaagaaacctatttttttaatatataagtagaagtagtcagccccattacttgaaaagattatcctttccccattgaagtgccctgcagtttttttgaaaatcaattgaccatacgtgtatgggtttatttctgaattctactttgttctattgacctgtaaatctcttcttatgtgaataccacattgatagacgtttataagcctggaatcagagaaacctccaaatttgttcttctttgaaattattttggctattctatgttctctgcctttgcatataaattttagagtaagctgtcaatagctgaaaaattagcctgcttggattctgcttgggattgtagtccatagtacaatttggggagaacaaatatctaaaccacattgtccttcatttcatgaacatgatggtatatccccgtaggtattaggttttctttaatttccatcaacaatatttttatagtcttcagtgtacaggtcttgcccatatcctgttaaatttgtaggggtaaatttgtaggggtggtatatctttgcacgtattaggttttctttaatttccatcaacaatatttttatagtcttcagtgtacaggtcttgcacatatcttgttaaatatgaaggggtaaacacacgtttcgtgtttctggaaaatctttcaaatggtattattaggttaatttaattttcttttccctctagcactattggggcataattgacaaacaaaactgtacatatttaaggtgtatggcatattattttgctatatgtataattgtgaattaccacaatcaagccaattaacatctccatcacgtcatatagttactatggggtgtgtgtgtgtgtgtgtgtgtgtgtgtgtgtgtgtgtggtgaggacacttagaatcaactctcttagcaaatttcaagtatacaatgtgatgttattaactatagttaccatgctatgcatttgatctccagaatttattcatcttataactgaaaatttgtaaccaaacttcaaatttgtaccaaattttaaaattgaattttcagctgagtgcagtggttcatgcctagaatcccagcactttgggaggtcaaggcagatggatcacttgaggtaaggagttcgagacaagcctggccaacatgatgaaactctgtctctactaaaaatacaaaaaagtttagccaggtgtggtggcacgcacctgtagttccagctactcgggaggctgaggcaggagaatcacttgagcccgggaggcggaggttgcagtgagccgagatcatgccaccacactccagtctgggtgacagagcgagactctgtctcaaaaaaaaagaaaagaaaagaaaagaaaagaaaaccctgaattttcagttactgatagttcctcatgtaaaaaaaaaatttgatttttatgtttatttactttgcatcttgcacacattttaggtctagttgctttcctatagatattttaggattttctatgtaaatgatcatatcacctgtgaataaagagttttacttttctctttaaaatctttatgcctttattttctagcccttgtcttactgcactggccagaattgccagtacaatgttgaatacaaatcttaagtgaaaagcattcagcctttcaacattatgaagtataatgttagttagctgtggcatttttgtaaaggctttttattataaggttgagcaaattattcctattctcagtttactaaaagtttgtatcatgaatagatgcttttctacaatgactgatatgatcataaggttttcttcctttattctgttaatgtggtaaaatatattaattgattttatctgttaaaataaccttgcctttctggcatatatcccacttggttgtaatgcaaaatttttaagtgtatgccggacttgatttgttactattttattgaggattttgttactgtgtttatgagtgatattgatctatagttttccatttgtgaaatgtctttgttatcacagtaatgctgacttcatataataaattgggaacaacccttatcttttattttctaaaaggatttcaccagtaaaccacctctatgtaaagtttccttgtggggaagaatttcattatgatttaagcttccttaacataggattatttagattttatatttcttcttgagttacttttcctaatttaggtctttcaaataattcttccatttcatctaggttgtcagttattgctacaaagttattcatattgttcctttattattctattcattctcctggatctttattcatatcccctcccttttatttctattggctgtttatattctattttactgatattgattttaatcattctcactttgggtttaatttcctcttttatctcattttttttaaatgtggaagcttaggtctttcatttaagacctttctccttttcctatataagaactgaattctatgagactcctaagcactgcactagctttacctacaaagtttaatattcttggttcttatttgcatttagttaaaaatattttctaagtttctttgtgactttagcaactagattatgatgtatctttgtctagttttctttgtttttgtcatgctttgcatttgttgagcttcttgggttggtgttttcattcaagttagaaatttttcagccattgtttttgttatttttttttgttattctttcattcctaacccctcctctccttctgaatctccaattacacatatgtttcattgcatgatattttttcacaggctctgttatttattttagtcatttttttctctgtattttattttggctactttcatttgcaatattttccatttcaccaatcgttccttctgcaatgacagtctgctgtttattgcatctactttatttttcatttcagatactgtctttttcatctctagatgtttcctttgaactcttttatatctacatttctctattcatgtcacctcttcctttaaacctttgagtatatcaagcatatttatagcaaatattttattctctcatatacaaattctatcaaatctgtaattccaggcctatttttattgactaattttttgcatgttcatgactttcattttccttattttcatgtgtagtaatttttttaagagaaggcttctcactctgtcacctaggctggagtgcagtcatacaatcatagctcactgcagccttgacttcttgcactcaaatgatcttcttgcctcagcctcctgagtagctgggactacaggaatgtcccaccacacttggctctgagtgtagttgtatttctttaaaaattactggacatcgttgtggcatagagtaaagttatctggagatcagtttaattcattcaaggcttgcttttactttttttttttaggtgggtctacagtaacctttactctggagctaacttaaccccactgttaagacttacgttccctctggaatgtctagtgaatgtgccatgtattaagcatgatccctctacttgggctggtagttacttgaatgattgttggccttgtgtgagctccagggatttttctgtttatgtatctccagtattgttctttctttggaggtttttctttttctgtcttcatgaagtttcactcttgtgcagattgatattcaactgaagatacaaagataactttaggttgttttctggacctcttttttggtatagtaccctcttttctgttcctctgcctgaaaattctagctgactcagccttccccaactctagtttctgtactttcaactcagaggattacttgaccctgtttctgtttttctacctggcaccatatttaggaattggattcaggcaaaaagctgggtgatggtagggtttgcctcctttgtatcttttctattagggatcacagtcctgtcttttatccaggtctgatcatgaatgtttgacatatttttgtccagtattcagcagttttcagaaggagccactccataccctattacctcatggaagtttgacaaaacctttaaaggtttgacaaaaacactttttaaaagaagacgtgtattattcatatctgtttctccattttagacctttcttcacttcttaccggctaaataatcccatttcctctattttgtacaaatccctcaaacatattaatattctcttcctccacactgttaactgcacatttatcacataaagttagtcttttctttccatcatcatgcttgtcttgccaatttcctaattcataataaatagatggtcctaggaaaacaatctcacctgtaatatgagagttattcaattaattttttgcatcagtgaatacacataccttttacaaccaacctgaacttcctgtgtgcataatttcattgctacttaacttaattaaaaaattattgtttatgcccaatatttcaaataaatttatttaaatttattaaatatttattgattaaaaactactgtctacaaggctgaactctaggatgagggaagaaaaatataagtatgtcataaactctgaactcaaggtgtaaagacacatatctatacataactagacagtaaaactagaccaaaattataagcattacagagatactaaaacaaggtattagaaaacataaagaggaagcaaccagggcaagtagaggagagaattcacagagtgtttgcatttgagcaaaagcacctcatgagataagaattctgacagagaaaaggggagatgggaatgaggcacagagtttgcatgattaaggcagtatgaatgtgcttgctgtgtctggcaaatgagctattaggaaaggcatggtggggagatggtacatgaaaaataaatcagggctctattatgtaaaactgatagtttaaaacaagttcaacattagtcaaggcacaattttctacttcttattctactgagatcaaaaaatagaaagcttctacgtattagatacaaaaggattcagagactgtttctcttctctaaattcccataattcagatgtttggacaactcaatctattgttttgaactattttctggagattgcatgaagtatatcttatctctgtaattgcaagaacaatattttctattatttgtgtatcctgcaagatgactagcacagttcagggcacatcatgtgtatatacgttttgattagacaactcttgctctttcacatgttctattttgtccttagatgactataaaatagaaatgctttcagtgctgatgtttacgtaaatatgtacttgtatgcatgtgtgtgtgtatattggactgaaacagaaattaataggcatgtttgatcaaaaaaatgtgaagaagtctctcaacagccccgcaatcaaaagataaacacccccattattaaatagcaatattttatccttttcaatatacaacatatattccctgtcttttctcatctttatattgtatacatattatttctatcatattttaagccattttctgggaaagcagttgttcagttacatgaaagtaaaatttgggagaaaaagtatataattaaaatgtatattaactaagtcatgataaatcatcaaaacttaggactgaagcattttatattgaaaataaaatgaatataaattagacattaagtctgttagatcagaagtctgttagaactgactaactctagttcacgacactaaatcaaggtagcagaaataaagtagtatgtggtactactccagatattgccaaatttaaaatgcttcttttgtatgctcaatagcattcagtaaattttttttggttgaaaaatttattaattaacgctagccaaagaaaataaaacctgatgttttctcccccaccccaaataatctttaataaacatattaacaatgctgagtgattttaaaactcttttcttttttgagataaaattttttaagtggaaaagaatttttcagatgtaccaagacaagttcaaaaacatggcaatatccttcaacctatgcaacattctcaccatcttgtcagcatttaattaaatctccctgacccaggttcaaatgccagaattggaatacctgaaccacatcctatctagccaaggcattaaacccatgctggataagtcttctgtctgagataatgaagtaggaggtacccaggacaatcaaagacatcagcaacttctgacttaccaggtttactgttaattcattccccatttcttcactttgatcttcctaatggtgaactaatttcatcttcaagaaaaggaatttttctactcttcatctatggatttccatatctgaaaatccctttcaaatacacgtaactctgaccaaacagaactactccaaacatatctgaccctgtgccactaaatctgtcagttacaacatcaccagggaatgccatcctgtcattgcataaagacaaaacctcttcctgtggcagcctgcagctaataactggttgaagaagtgcagctacctcctccaaactgagaacaattctgaaaggtcaccccagcttctgagttcctgtgatgttggtcaagcagaaacagatcattcagtggacagcacctacagaaaccttctccagtaaggtgtgaatcccaaccttagggagaggtgctctcttccatgattgtccttccttggatactctcccccagccatagaatacctttatagtttgttttacatatttatagttactctcctatcatagtttaataatctttggtgttaaactttcttgggaaacttcaacacagaaatataagcaggaaatgataagaaaagaaaaggctaatgttgagccaaagacacaataaaactggttgaaataagaaaagaatacattatgaaatttaaactattttgtctctaaaagccaaactgattttacataaaatcaaattagtgttttggtggccaaattggagacattcaccaaaatccataccctcaaaaaggtcagaaaacatggtgtatcaaagaaatcaagaacactgatctattctaagaccatataatcttaggtgaaaaagcctgagcagagaatacaaacgaaataatcaaaaatataatagaagaaaactttccagaatcaagaaagatgaggtatacaacaaatgcctggaagaactggaaaataatcatatcaagacatactcaggcaaaatcttttaattccaaggaaaaagaataacctatccaagcttccagaatgaacactcagattgcctactgtactagccaggattcttagaggcaaataatagaaactgactctgttaagtaaatcagatactttgtttttacatcccaaacatccagaaaacaaagaaaatttaaaaatcctgaagtccaccatatctatgccaagaagaaaaaatattatgttgaccttatatttttggaacatatgcaatataaacaatagtataagcattatatgacataaaatgtcaacagactactcaaggtacaaggttataactcaagaattttataccaagaaaagttactggttatgtttaaaagcaagacagataatgcagtcctcatgaataattcttgagataatacatttatcctatttgaaaataaattacaacttgccaagagacaaattaaggaatcaaaaaggtgcaacatgtcatataaagtataattcatgaatattgaaataaattaaatacaaagttttaagcataacaatatttattaatataattatagaatatggttattaatatggtcattattttcagtgaaacaattacatatttatagaactcaagatcagctcaaaattataatttagaagggtaaagtatggcaactagttacaagattaatataaaaatcaacagtctttctatttataagcaaagacttctagaatatacaacaggaaaagaacatgagtcaaaaaatttaaaaatcaaaaattaaaacaactaacaataaccttaaataagaaacgttggtgccctagggaaataaaactaattatgaaataaagaaatacatgtcaagagacaaaggaaaattaatttaaatggagaaaaatgtcataataatgtttgagaaagctgaacttttcaaagatggcaaatcttcctcaaataaaagtgtattggggattataataatttatggatgctttatataagttatacataaagtgagggctgaaactttgtcatattttattatatctaagactagaactgtacataacacacatttgtttaacaataaatactttccaataaatggttaaagtaataaattaatcctagctggacctgcaaggaaagatggcaatatgaatttaaaaaccgctataaaataaaagaaagaagagaagagctaaggaaatgtatgacaaagaatataagtactatgaaaagtaaaacactacaggacttgtgcaagaataatagagtaaatagttctagttcagaactgaatatataatctttattataaaaacacatgaaaaagaagcaccaaagtttataaaaaataagtggattactcaataaactatgatgggaaatgagtttatgtgtctgaaaacaaaacatgcgaattgaagtcttctgtgggaaaaaataggcattttcttttaaaggcatttctactataaatagtagtaaatataatagaagaaatgatttatagacttcatttcattaaaaaaattaacccctgtatttgaacattaatactaaaattctaaaacacgtgaaaactttggaaaattatttacaataaatacaacaaaataataatatccttaatatgcaaagactctatataccagtaagaaaaatagcacggtaaatgaaaagcatacaaaagacttgaaaagatcattttaaaagtagtacaattgaccactgatcatacaaaatatgtttaactactttagtatttatagcaattaaaactcaaatagcaaggagataacatgttttatcaatcaaactggcatgttttcaaaccataatgtttggtgaggggctttgcattgggaatgtaaattaacaaaaatattttgaaggataagttggtagtatgtgtaaagaatctttaaaaagtttcttctctttcagaaattccacttctagttatctatactaagagaataaatgttatatgtatgtgtaatgatattcattattccattgatataaaagcaaataattgaaaacacttaatatttaactgaaaaacactgttaaataaattagagtatatctatgtaagaaaatatttaaagatctttaaaatcatattctcagaaaatatttagtaatatgaaaaattgtcattttattattttaatatgttgcactgttttaaaaagtagtataataaaccctaggaggataaattccagttttaaatgttttttaataaaatttatctttaaatagtgaaataatggcctatttaaattttttaatacttttctgaattttgcaaactttcaatgatcaattcagaatgcttttataatcaaatattactgatgttatatgtgtcaatgaagttatttcacctctaccaatctaacccaaaaaaaggtagatgtgcacaaagattttttactcaaggatatttatcatcatattatatataataaaataaatgtataaacaatctaaatgtttaaccatagaaaataattaaattgtgctacctctgtgtgtatacttttatatattaggatattattactataagtaaaatttcataaaatgttattggcatgggaaaattttcatgaaaattaagaaataaaatgcacagcatgattctgtttcatttttatagtgacttgtgatagggtttggctttgtccccactcaaatctcatcttgaattgtactacctgtaatccccacatgtctttggagggacccagtgggaggtaattgactcatgggggcagataccctcatgcagttttttgtgatagtgagtgagttctgatggtttcataaggggtttttccccctttgcttggcacttctccttcctgctgccatgtgaagaaggacatgtttgcttccccttctgccattgttttaagtttcctgaggcttccccagccctgtggaactgtgagtcaattaaacctcttttcatcataaactacccagtcttgggtatgtcttgatagcattgtgagcatagactaatacactcgcatatataaaaactaagataaaatatattaaaacacatctctgtatgacaggtgaattttcattattcatacatatcctattttccaaattgtctataataagaaaaaacaagctttttaaagaaaaatggaagattattcctccatttagaatcccataatactaagtgatttgttgaaatgttcatcagaatgcagaggcaatcctaagaatttaactgcaaattacagaattttcctatcttcacactttctaattgccaaataatttataaaaataagtaggacttaatttcatgacatgtattaaaataaataaagtaaatggttttcaatttgaaatattccattaagtcttttctaacttgagcttatgaaatgcatgcttgcttcttgtttctttttaggcctttgcttccagaaatgttaaaataacatgattactaaatatatctccaagtttcatacagctactgtgaagtcaaaatctggaaaacaagtagaaaagtggagtacttactgttggcaagaactaccacagatccctaagactattgttctataaatgttaaattataaagtgatacaaataaattagattttaaaagggaggaatggagtaggaagaaggagaatgtgttgtgagacacagtagaacacacaggaagagttgaggtatatatctttattcttactgacatatatcccaaataaatgaaagcaaactcaatatttcatgtattcagattaataacacctatttctaattttaatgtaataggttctttaacaaaaagttttcaaaatatttcaaagggcttataaaagtgaatctttagctttcttctaagtacacttttgcgctcctacatctttcatagcctagacctaatttctagtttctggcctcatctccgtttctaggtcctgctccacagaggtgtgatcaggagggccatgcaccattacaaaattgacatgacttagatcttaaaagcagtaccacttgcccctcctccaaactgtttgtttttttatttttttgttttttttccttaaggctgctcaagaaagtagcaaataatatagcctaaataatatatgatttgttgaggacttttttggaggagaggaaagggatgtgattatttaaaactgcacaagtgggaaacaatttccaaatgcttttcagaaaatatcttgtaattagattctcttttaaaactactaggactttgaagtaaaataatgtctgctgctgagaacactgttgaattgcagttaactcctactagtgatcaaaatgacccagtcaaatctccagctgcttatgtaattctgaataaattctccattttttaagaaggatacaccaaagaaataaagttcagtttgtagtggctcacgcctgtaatcccagcactttgggaggctgaggctggcagatcacgaggtcaggagatcgagaccagcctggctaacaccatgaaaccctgtctctactaaaaatacaaaaaattagccgggcgtggtggcacgcgcctgtagtcccagctactcgggaggctgaggctggagaatctcttgaatgtgggaggtggcggttgcagtgagctgagactgcaccactgcattccagcatggacaacagagcaagactccgtctcaaaaaaaaattttttttcagttaaaagatacccactaaaacaactctgtcttggcaaaaattgcaacacttcaataagggagaatatttggcatgctccattcattactctgttgtggtgtaccttacgagagacaaccaaataagatagaacaaaatctatgttgagaacttactgttctacttaacacaggagtggagtacatactgttaccaagaactgccacagagccctaagactatagttctataaatgttaaattacaaaatgatacaaatcgttttcatgattccaggaagatggcagcctgtgtctgtattctctattccttctccttcctaagtccctggtgtggctacttttcctagaaaataactaagtgtactcttggaggctagaaagaacctggaatcatctgagattttaagtcctaaaaatgaagatataattctggcctaaaacttactggacagtggtcagaaccccttctaggctaacttctcctacataacttggaacaaatgtcacagattcccggataaccacaagcaaggagagaaaattctcctacctgtttactaagagagcccaagtgtccctttacactgtagtgttgggctaagtacaatccatccctgggctaagtacaatccatccctgattgcaccaaacttaaaaaaaaatctctttttctaagcctaaatttcactaaaagcactctggagctaaacactcccatttaattatttattgttgtttaattaccattttcttagagactccaaaacctgagcagtacaggtgttgacagatcccatgtccaataatatgaatgcccattaatatgaacaataaggatcaacaaaccattttatgagacagtggcttaaaagaagaaaacttagatgatcaacaagagtagtagaggtaaaaataacagaggacacacaaaaaaatggggaaaaatgtactataatctcttataaatatgaaattagaatgtgtaaaaacagtgtctagaactaaaagaaagaactcttgaattttaaagttcagttgagaaaatgaaaacgtcactgaagaaaagtaattttgtgttttagaaaatcaagtgaagaaaacagaataaaaatgaaccctgataggtatcaagtacagattaaacatttgtaagttggtgaataatgggataaaaacaaatgaagatgtgatcaaagaaataataaacaaaagctctcctcatctgaagttacactcagattaaaagagctcacttgttaaataatttaaatggcacgtatttaaagataatctgatgatttttgaactctaaagttttgttgttgttttgtttgagacagggtctggctaggtcacccaggctggagtgcagtggcaccatctcgactcactgcaacctccacccccaggctcaagccatcctcccacctcagcctcccaagtacctcggactacaggtatgtaccaacacacccagataatttttttttattttttgtagaaatagggtttcactatgttgcccaggctggtctcaaactcctgacttcaagtgatccgccctcctcggcctcccaaagtgctgggataacaggtgtgggctaccatgactgtccgaactctaacattgaactggaaatattaccagtttcaacaagggaagagaaaagcagatattttcaaataaaaaagaaccaaattattatcaaattcttaactgtaacatcagaagttagaacacaatagaccaaccattgtagattatggaagaaaataactgttaaaaataggcagctggacttgaaatcctgcctaaatatgggaaatggcagacaggagtcaggactaacttgcagcacccactcggatggagagaacagcatgtggagactcacattgtaaacttttgctccaagaactgccataggaacataccagaaaaactgaaagaattcacagatcctttgaaagaagcaccttgttactgcaaactctgtgagacagttgaaaaaatgtcttgaaaagtgtgaaaggggaaaatctgcctccaaacacacatcctccttggggaacctgaaaatccagaccacgggagaaggatttaaacttatctagagctgaaacaaatttagacagccaagcaaaatacaaaagtagaagaagcaggccaggtatggtggcccatgcctgtaatcccagcactttgggagacgaaggtgggtggatcactcgaggccaaaagttcaagaccagcctggccaacatggcaaaaccccgcctctactaaaaatacaaaacctagccagccatggtggcacatgcctataatcccagctggctgggaggctgaggtgcgaggatcacctgagcccaggaggcagaggttgcagtgagccacgatcacgccactgcacaccaggctgtctgttaagactctgtcaaaaaaaaaaaggaagaagaagcagcagcaggaagagccctgtaggcagtctcaggggagccatttctgactttatctcacaggggtctgtgggagggctgcaagtggaactggggaaggaccacagggagaaagaaacttccagctgaacttctgtaataattttgaccaagcatgaattttcctgggcagaatcgggggagggggagaataggaagtgtggacataaacacagaaactgcggcaggcagggaggggtgaagcctgaaatccctgcttgctttctcagctcttagtgggtaggcttgtagcctggtacaagatctcagtactgctcacaggctccctgtatataaactcagtgctattggaggggcgtggtaagagttagactagccttactggctgcatgggagctgagtgaggcccgtcactgccagcttttccccacttccctggtgacctgtataatgtacgagaggcagccataatccccctaagaacataactccattggcctgagaaccacaatcccatcccccacagaagccatagcaagtcctgcccaaggagagtctgagctcagacacacctaacccggcctccacttgatgatttttctccacctgccctggtagccaaagacaaaagacataatctcttgggagctccatggccccactcatcacctgagaatcctgagtacttatccaggcaaccttaaagcaagcttgtatacccctatactatgcagttgatctctcctgaaagtgccacctcctggctagaggccaaccaactcaagccattacagcaactcataaaagaacaaacccactccaaagaagaagaaaacaacagctaattccactgcctgtagcatcctagctaaccagaggtcctgagtctgtccatgtgacaacttcactgctaacacaactagcattgagaaaaccagaacaataaacaaaattacaaccaaggacactcacggagtccacttcacccctctgctacctccactggagtagctgctggtatccacagctgagagaactgaaaatggatcacatcacaggactctttgcagacactccccagtaccagcccagagccaagtagctccactgggtggctagacccagaagagaaataacaatcacagcagtcaggctgtcaggaagccccattcctagaggaaggggaagaacaccacatcaagagagcaccctgtgggacaaaagaatctgaatagcagctctttagccccagatcattcctctgacatattctacccaaatgagaagaaaccaaaaagacaactctgctaatatgacaaaacaaggaccattaacacccccaaagatcacattagctcatcagcaatggatccaaatcaagaagaaatctctcaattgccaggaaaataattcagaaggtcacctaacacataaggactcacataaacttaaggaaaaggggtggaaagagatattccatgcaaacagacaccaaaagcgagcaggagtagctattcttacataaggtaaaacagactttgaagcaacaaaagttttaaaaaacaaagagggacattatgtaatgataaaaggactagtccaacaggaaaatatcacaatccaaaatatatatgcagaagttcccaaatttataaagcaattactactagacctaagaaatgagacagacagcaacacaatattagtggaggacttcaatactccactgacagcactagacaggtcatcaagttagaaagtcaacaaagaaacaatgaacttaaactatatcctataataaatggacttaacagatatttgcagaacattttctatccaacaactgcagaatatacattctatccatcatcacatggaacattttccaagatagaccatatatgataggccacaaaacaaagctcaataaatttaacaaaactgaaattatatcaagtgctctctcataccacagtgcaataaaattggaacaaaaggaaccttcaaaaccatggaaatacatggaaatgaaataatctactcctgaataatcattgggtcaacaatgaaatcaaaatggaaatttaaaaattcttcgaactgaacaataatagtgacacatcctatcaaacctctgggatacagcaaaagtggtgctaaaaggaaagttcatagcattaaatgcctacatcaaagagtctgaaagagcacatatagacaatctaaggtcacacttcaaggaactagagaaagaagaacaagccaaacccaaacccagcagaagaaaagaaataaccaagatcagagtagaactaattgatattgaaacaacaacaacaaaaatacaaaagataaatgacatgaaaagctggttcttggaaaagataaacaaatcaatagatcattagtgagtgtattagtcccttttcatgctgctgataaagacatacccgagaatgggtaatttattaaaaaataaaaaaaaaggtttaattgactcacagtttcatctgactggggaggcctaacaatcatggcagaaggtgacatacacgtcatacatggcagcagacatgagagaaagagaatcaagtgaaaggggtttccccttatgtaaccaccaggtctcgtgagacttatacactaccatgagaacagtatgagagaaactgcccccattattcaattatcacctactgggtccctcccacaacatgtggaaattatggaagctacaattcaagatgagatttgggtggggacacagccaaatcatatcagcgagattaaccaagaaaagagagaatatccaaataagctcaattagaaatgaaatgggagatattacaatagatatcacagaaatagaaaagatcattcaagactacttgaacacctatatgctcacaaagtagaaaaacctagaggagatagataaattcctggaaatatacaaccatcctagattaaaccaggaagcaatagaaactctgagcagatcaataacaagcagtgagattaaaatgataataacaaatcgcaaacaaaagatgttccaggaccagaggaattcaccgctgaattctatcagacattcaaggaaaaactggtaccaatcctattaacattattccaaaagataaacagggaatcctccctaaatcattctatgaagccagtatcaccctaataccaaaaccagaaaagggtatttgaaacaaaagaaaacaaaaaaccaatatcccttatgaacatagatgcaaaaatcctcaacaaaatactagttaactgaatccaaaagcacatcaaaaaggtaatccaccatgatcaagtgggtttcataccagggatgcagggatggttcaacatacacaaataaatgtgatacatcatataaacagaattaaaaacatcatctcaatagacacagaaaaagcatttgacaaaatccagtatccctttatggttaaaatcctcagtaaaattggcatagaagggacatatcttaaggtaataaaatccatctaagacaaacccacagccaatattatactgaatggggaaaaagtgagagcattccccctgagacctgggataacacaaggatgcccactctcaccaattctattcaacatagtactagaaatcctagccagagcaatcagacaaggcacagaaataaagggtatccaactcagtaaagaagaagtcaaactgtcactggtcaccaatgatatgatcatatacctagaaaagtataaagactgatccaaaaagctcctagaactgaaaaaatgaattcagcaaaggatcaagtgacaaaatcaatatatacaaatcagtagcactgctatacaccaacagtgaccaagctgagaatcaaatcaagaactcaactccttttacaacagctgcaaaaaaaaaaaaaaaaagggaaaaagaaatacttaggaatacatctaaccaaagaggtgaaagatctctacaaggaaaactacaaaacactgctgaaagaaatcatagatgacacaaacaactggaaatacatcacatgctcatgaatgggtagtatcaatattgtaaaaatgacaaatctacaaattcaccaaactagaaaaaacaatcctaaaatttatatggagtcaaaaaagagcctgcatagccagagcaagactactccaaaagaataaatctggaagcatcacattacttaacttcaaactatactataaatctgtagtcaccaaaacagcttggtacaggtattaaaaataggcacacaggccaatggaacagagtagagaacccagaaataaagccaaatacatgccggcttgatcttcaacaaagcaaacaaaaatataatgtggggaaaagatatcctattcaacaaatagtgctgggataattggcaagccacatgtagaagaatgaaactggatcctcatctctcaccttatacaaaaatcaacccaagacgaatcaaagacttaaatctaacacctgaaaccatcaaaattctagaagataatactggaaaaacccttccagaaattggcttaggcaaagaattcatgaacaagaacccaaaagcaactgcaacaaaaacagagataaatagataagactcaaactaaaaagtttctgcacagcaaaagaaataatcagcagagtaaacagacaacccacagagtgggagaaaatcatcacaaactatgcatctaactatataaacaaaggactaatatccagaatctacaaggaactcaaacaaatcagcaggaaaaaacaaacagtcccatcaaaaagtgggctaaggacatgaatagacaattctcaaaagaagatacacaaatcaccaacaaacatatgaaaaatgctcaacatcactaatgatcagggaaatataaaccaaaatcacaatgcaatatcaccttactcccagaagaatggccataattaaaaaattaaaacataatagatgttggcatggatgtggtgacaaagggaacacttttacactgctggtggaaactgctagtacagctactatggaaaacagtgtggaaagtccttaaagaactaaaagtagatctaccgtttgatccagcaatcccacttctgggtatctaccccgtgaaaaagaagtcattatatgaaaaagacatttgcacatgcatgtttatagcagcacaactggcaattgcaaaaatatggaaccagcccaaatgcccatcaatcaacaagtggataaagaaaacgtggggtgtgtttatgtgtgtgtgtgtgtatacatatatatatatacacacacacacatatatacacaatggaatactactcagccataaaaaggaatgaaataatggaattcacagcaacctggatggagttggagaccattaccttgagtgaagtaactcagaaatggaaaccaaacattgtatgttctcacttacaaatgggagctaagctatgaagatacaaaggcataagaatgatacaatggactttggggactccagggtaaggggtggggattgaaagataaaagactatgcattgggtacagtgtacactgtttggatgataggtgcaccaaaatctcacaaatcaccactaaagaacttatccatgtaagcaaacacctatttcccaaaaagctattgaaataatacataaaataatagtaattttaaaaataagcagaagaccattagtcagaggctgtctctgcactatgagttgctacatgatgaaccataacctaatttggtatgtaaacaaaccaaaatgtaacttaggagtataacagccaagtttcagctaatcacaagcagccaggtttcagtcaattataggcagccagcttttcacaacatgcccaaataaggcaaaagccttatcacactatgcccaaataatataaatacctcattgtagccaatcagatggtttctcgactttgcttccatgttgaaccaataaaagctcactgctcatgctgctgggcagagctctctgaacctcttctggttctgagtgctgcctgattcctgaattggtctttgttcaattaagctacattaaatttaaattgtcttaagtttttcttgtaataaaactatgaatcaagaatcctattaccaagcaagatatcactcacatgtaagaaaataagtatgacaattatagacatgtaagggttcatttacattatttaaaaattactctaaaaagcattttaagtaactcaaaccacttcacacatactatgaaaaccttagaacagtatactttcatttcctcctatcatttttgtgctgttgttgccatatattttaagtgtacatgttagaaatcacacaatacattttattatttttactgtacacagaagattttaatctcctttaagaagattaaaaacaatgagacaaatttctcttacatttatgcacctatttatcattgtggaacctttcattttttggtagagcaaactttccatctgatatcatttttgccttttgcctggataacttcctttaatctttctatgagaaagatgtgtttacagtgaattctgtctgtgtttgtctgaaaagcttttaccctaccttcacttatgaaatataatttaaatgcaaataaaattataacttgatagttttttcttttagtgttttaaagatatcatttcatcacttcagactcacagagtttataagaaaaagtctggttttattcttttatacatagtactctggtaagtaatataccttttttctctggctgcttttaggattcttctttacatcactgattttcaataattttattttaaatatgactcaatgtggctcctttaagtttattttgcatacagtttattcaacttattggatctgtgggcttagagtttccatcaaatgttgaaaattttcaaacattattttctcaactaatttttctactttcttccctccctttcaggatgtcagttacacatagcttagtggctgagttggtcactgctcactgatgctctgttctattttttttcaatccttcttctttctgtacttcattttagtttctattgctagatcctcaagttcactaatcttttctgcttcagtcctatctctgttattaatctcatctagtacacttttcatttcagctatcatattcattatctccagaagttccacttgagtcatttttttcttacacttctctcctcatgctcatgtatccctttatgtgcttgagcattttataacactgttttatatatacataatataacagctattttgtaaacagctttgctgctaaatctattgtctctgtttctactgatttatttatttttctccaggttatggcttctttacacacaaaataattttttactgtttggtgaacattgtgaattttacattgttaggtgccagattttgttatattctttataaccaggacatagttaattaatatgcagatcagtttcattactttgaggcttcctttaaactttgttaggataattccagaacaatcttttttcaaggccacattatccccattattaaggagagactcttctgagtactcttccagtgccttgtatcttacaatttaggtctcttcttttcactgttgggaatataaaacattccccactctgtgggagctctgagaaccgctgagtattgcttttcagtgggtccttccccagcctcactgtgtgcagttcccacctctccaataccctgagctacaaatcctagcaaattcaagctacctgaaatctaaactctgtctcctcatcaagaactctctccctgctttgtagtctataaaccaccttcaaacacataggtgggtaattgtaaggctcacctcatttgtttctcttatctcagaatttacagacatgtatcgcctaatggccaacaactgaaaacatctgttttatatactgtgtccatttttctagttctttacagtggaaaggatattcccaaaataacaaatgcctcttgatgagagactgatcgttttcggaaaatatcaatataaagaaaaaaggcaccaaggactgtgtctcaagcctgtaatcctagcactttaagaggctgaagtgggaagatcacttgaggccaggagttcgagaccagcctgggcaacataacaagacttggtctctagaaaaaaacatagccaagtatagtggtgcacacctgtagtccaaactacttagaactacttagaaggctgaggtggaaggattgcttgagcccaggagtccaaggctgcagtgagctatgattgcaccatcacaatccagcctgggtgacagactgagatactgtctctaaaataataataataattacatgagcaagtgctaaatttaaaaaaaaaaaaagagagaaaatgcaagttacaaaagttgtgaatttcttacaagtaatatattttaagggttccattgtgtataaaaaaattacctatgtgatcttggactagttatttagactttttagccctaaaatcatctcaattcaaattttcctcaaactgaagaaattttcttcccccaattcacaatcctctacttcctcatcttcaatgttcctacattacactattgtaaatatcccctatttgatattttggtttctagttttaaactattcaaatccatctttcactctaccactagattattctatttaaaacacaaaacatgtcttattcatgtttgaattcctaataattagactggattgttaagacaaatctctctaagaagatctcttttaagatgaaaccaggctaacaattagagccagccatgtagagattaagaaccaggcagagggatcaaataatgcaaagaagaatacaagagtaagcttagtgcgtgtggcaggcagaattttaagatggctctaagattcctactctctgatttacacaccctgtatattaatcctcccctcacatgtcagctcaatctgtgaataatatgcaacatcactcttgtgattatgttatgttacctggccaaagaagttatgtagatgtaatcaagctgggttagctcaagttaatcaaaagggagagtatcctggctgagccagacctgatcaggtaaggatcaggtctgctcacctgaggtcagaaaaattcatctgctggctttaagaaagttagcagtcatgcactgagacagccatgtggctagaatctgagaccagcctcaagttgaaagcaactctcctccaatagtctacaagacaatagaggcctcagttctacaacctcagaagtgaatttaaccaaaaacacatgagcctggcagagaacaactgaacttcagaggagaccacagtcttaaaagacaacttgattgcagccttgtgagaccatgtacagaggacctgttattagtccattctcacaatgctatcaagaaatacccaagaatcgataatttataaaggaaagaggtttaattgcctcacagttccccattgctagggaggcctcaggaaacttacaatcatggtggaaggcaaaggagaagctggcactttcttcacagggcggcaggacagagtgagtgcaagcagggaaatgccagatgcttaaaaagccatcagatctcatgagaactcactcactatcatgagaacagcataggggaaaccgccgccataatctaattacctccacctggtcccaatcttcactcatggggattatggggattaaaattcaaggtgagatctggatggggacacagaggcaaattatatcattccacccctggcccctcccaaatctcatgtcttttcacacttcaaaaccaatcatgccttcccaacagtaccctaaagtcttaactcatttcagcactaattgaaaagtccacagtccaaagtctcatctgagacaaggcaagtcccttccacctataagcctgtaaaatcgaaagcaagttagttacttcctagatacaatgagggcacacacattgggtaaatatagccattccaaatgggagaaaaaggagctacaggccccatgcaagtctgaaatccaatggggcaatcaaatcttaaagttccaaaataatctccttttgactccacgtctcacatctgggtcacactgatgcaagaggtggtctcccatggccttaggcagctccacccctgtggctctgcagggtacagcccccatactggctgcttccacaggctggtgttgagtgtctgccggttttccaggtgcacagtgcaagctgtaagtggatctatgattccgaggtttggaggatggtgaccctcttcttgcagctccactaggcactgccccagtgggaactctgtgtggaggcttcaaccccacattttccttccctactgacctagcagagggtcttcataagggctctgcccctgtagcaaacttctgcatggacatccaggcatttccctacatcctctgaaatctatgcagagattctcaaacctcaattcttgacttctgtgcacccataggctcaacactatgtggaagacaccaaggcttggggcttgcaccctctgaagcaatggaccaagctgtacctttgccccttttagccatggctggagctgaagcagctgcgatgcaaggcaccatgttccaaggctgcacagagcaggagggccctgagcccaccctacaaaaccatacttcctcccaggcctctggacctgtgatgggagggccttctatgaacgtctctgatatgccctggagacttcctccccattgtgttagtgactgacattcagctcctcactacgtatgcaaatttctgcatcaggcttgaatttctccccagcaaatggtttttcttttctattgcattgtcaggctgcaaatttttcaaacttttatgctctacttcctcttgaacactttgctgcttagaaatttcttccatcagataccctaaatcatctttctcaagttcaaagttccacagatctctagggcaggagcaaaatgctgccagtctctttgctaaagcatagcaagagtgacctttactctagttctcaacaaattcctcatctccatctgagaccacctcagcctggatttcattgtccatatcactatgagcattttgatcaaagccattcaataagtctctaggaagttccaaactttcccacattttccagtcttctgagccctccaaactgttccaacctctgccaaagttccaaagttgcgtccaaattttcaagtatccttgtagcagtgccccactctcagtaccaatttaggacccagttaagctatgcctgaactcctgacacacagaaactgagataacaaatgggtgttttttaaatcatgaagtgtgtagtaatctgttacacagcaatagaaaactcatggaatatgtttaagaggcaagaacaacaaaagccagtacaactggggtatggtgggcattttaagataaaaaatgggataaattgttaggagattaggttggcgagatagatgagagtcaaattctgtgaaaatttgttgttaaaagtgggaagttttttataattttgcttgttaagtatataagaaagtcatcactgagatttaagcatgggaagaacctgattggcaatttttaaagaacattctggatgctgtgagtaaaatggattgtaggaggggaataacagaagaaggaatgagactagttagaaggctgttacaataatccggtgagaattgaagaaggctgggatagtggcaaaagaagttagatgtggtcagatagcggtcatattttttaaagtggagttaacaggaattattaatggatcaggttgagggtaagaaaaagagatgaggcccagcgcagtggctcatgcctgtaatcccagcactttgggaggctgaggtgggaggatcacttgaggtcaggagttcaagaccagcctgggcaacatggtgaaatcctgtctctactaaaaatacaaaaattagctgggcatggtggtgcatgcctgtggtcccagctactctggaggctgaagcaggagaattgcttaaacccaggaggcagaggttgcagcaagctgagatcgcaccactgcactccagcctgggtgacagagcaagattctgtcaaaaaaaaaaaaaaaaggaaaagaaaaagaaatgaatcagggatgactttaagtttttgacttgacgaactaagctgatggtgggttgtcgtttattaagcaggggaagtctatgggaggaaccagttggaatgacgggatggggaaaagcatgtgttctacttcggataagttgttttaactgcctactcatcacctgaatggtgatatcaggttagcagatggttatacatgtctcaaactgcaggcacaattcagaactagaagtaacagagtcattggcatgtaggcagtatgtaaagcaaaagtactggatgtattactttgggcaagtgtgttaattgaaaatacaaggttttctgtgcctaatccctggaaaatacaactgacatatttgaggtacagcagaggaagaggagtttgcaaaggagacttaaaaagagcagtcaaggagggaagaataaggaaaaatagtataaagtcatttaaacaaacagaagaatgtatttcaagaaagagaaaacaatcacactttatcaaataatgctgaaaggaaaaaaataaaatacattaggtcagagaagtgatcattggattcataatcatggatatttaaatggtagacttaacaaaagaactgttggagtactggttgtgatggactgcccattaaagcagagacaggacaaaatctaagtgtaaaaaaaccagaaacaataatgacagtagatatctctttcaaaatatgtcactgtgaaagggttcagagattgaagctattgtgttgtgacagctggggtcaagagattttgttttgtatggttggcggtaagatgggatatatcacagcatgtttttagaaagtacattggtatccagcatactattgcaataaaattaaagctgaccttatctgattctacctaactgaattttaatgctaaataaagccaaaactttagccagttcaggatagtcatcatatacatgatggcaaaatgaatgttaaaaaataaacaactacattgagagaagataccaggcatccagagttattcataagttaaatgactggttcctacacactggtctttcaacaaatattttttggactttttttttttttttttgagatggaatctcgctctgtcacccaggctggagtgcagtggcgcgatctcagctcactgcaagctctgcctcccgggttcacgccattctcctgcctcagcctcccgagtagctaggactacagatgcgtgccaacatgcctggctagtttttgtatttttagtagagacatggtttcactattttggccaggctggtctcgaacttctgacctcatgatctgcccacctcagcctcccaaagtgctgggattacaggcgtgagccaccatgcccagcccttttttggacatttttattcaaagttgtgagtaccaataattttctataaaagcattagaattgtcagactatgagatgggcacggtggctcacacctgtaatcccagcactttgggaggctgaggtgggcagatcactgtgtgtggtcaggagttcgagaccagcctggccaacatggtgaaaccctgcctctattaaaaatacaaaaattagctaggcacagtggtaggtacctgtaatcccagctactcaggagtctgaggcagaagaatcgcttgaacccgggaggtggaggttgcagtaagctgagatcatgccactacactccagcctgggtgacagagtgagacttcatctaaaaaaaaaaaaaaagaattgtcagactatggatggacttaccctctattttccaaccatctgtaatatttctatatggagtttcaacaaaaagtaatgacattaaacatgatactgtaaaagataaataaaacctcagctgaccaaagcatcataaatgtaatatcttaaaataataagagcataattatattaagacctacagaattatccatgtctagtgaaacataaagtaacaattttaagactaaaattgtaaagagttaatggttttcaacaaacacataccaaaaattaataattaatttttaatccatagaattttagaccataaaaagatcttacatgttattttgctcaacctattcctagtgccaaacttctttcttcagcatctctgggaaatctatgcttcagcttgaaaatgtccactaagaagctcatgctttctcaaggcaagtacagtggaacagctttcatatattaagctaaaacctgcctctcccaaacttccactcattaatcttagttttgtccttggaatgcatacttagaaagctctgaaattaaaggaacagggtctttacaaagcaaactgtttgctttcaaacttttgttactaggaatatctcaaagtgggggggaaatagtgcttctgtgcttaacaaatgagctctgtttataatcaaaaaagtaaggtttacataaattatttattatcaggaaatccctaaattcagaagtagcctatagaagttgacgttttaacaaattactaaaatcagcttttgttttgttatctgatgtggtcaaagtgttatgcatggctagatacaaatatagcaaaacttcaaactcacttcctcttttcttctaatttaatatttactgattaaatcaaattttaatatgcacttgcttctgcagtagaacagatatctcataaagacaaaactcccactgaacgtagtggtagtcatcagtgctcacagtctaatgtgcactgcaaaaacatgtagagaaaaatccattaaactacattggctattgattcttttctcctgagaagttccagccagaattcattgctatcactgtcttatgcatggtggtgcctcactaatgaaagattcagatttttttaaagggtctacctggcctaaataagatatgccacttaaaattagattcataataaaccaaacaccgcatgttctcacttacaaataggagctgaacaatgagaatacacggacacagggaggggaacaacactcactggggcctgtcgggggagggttgggggagacagagcatcatgataaagagctaatgcatgcagggcttaatacccaggtgatgggttgataggtacagcaaaccaccatggcatatgtttacctatgtaacaaacctgcacatcctgcacatgtatcccagaacttaaaataaaataaaacttttttaaaagatggtaacaatagacactggggactactagagcgcggagggtggaaggggagcaagcatttaaaaactacctactgggcactatgctcactacctgggtggagggatcacttgtaccccaaaactcagcaaagcacaacatacccatgtaacaaacctgcacatgtaccccttgaatctaaaataaaagttgaaataaaaaataaattaaaaagagaaattttttttaagtagattcataaatttcacaatttataaattaatacatatatggttcgttgttcatctcatgataaaatcacttggaaaaactccaaatgtcattaggaagatacctataagatgatgtagagtcattttatggagtctacgatatattgttaagtgaaaaacaaaagcttcatatcattcctactcgatttcaaggtgtactataaagctacaataatcaagacagtgtggtattggtgaaagaatagacaaacatattagtggaacagaataaaatccaaaaataaacacataccaatacgctcaagagatctttgacaaagtagcaaagcaagtcaatgtagatagcgtttcaacaaatggtgctggaacaactgaacatccacatgtaaaaaaaaaaattagacacaggtcttacacttttcacaaattaattcaaaatggatcataagcctaaatgtaaaatgaaaagctataaaacttctagaagataacaggaaaaaaatctagatagtgttgggtttggcaataacattttaggtgcaacactgaaaacatgatatataaaataaaaattgataaattagacttcatttaaacttaaattgaaaaattctgctctgtgaaagatactcttaagagaatgaaaggacaagccacagacttggagaagatcttggcaaaacacatatctgataaaggactggtattcaaaatatacaaagaacacttaaaatacaacataagaaaacaaataacccaatttttaaaatgggcaaaagatcttaacagctacttcaccaaagaagatatacagatgccaaataattgcatgaaaagatgcgaataccatatgtcactagagaactgcaaactaaaacaacaatgacataccactacgcatctaccagaatgactaacatataaaacactgacaacaccaaatgctggtgaggatgtggagcaacaggaactctcattcattactgtggaagtgcaaaatggtacagccactttagaaaacagtttggaagtttcttacaagctaagcacaatcctaccatgtggtctagtcatcacactggatttatttcatttgagaatttatccaaatgaaaataaacccacagaaaaatctgcacaggaatgtttatagcagctttattcataattacccaaacttggaagcaactaaaatgtctttcagtcagtggaacagataaacaaactgtggtatatccatgcaatgaaaaattattcagtggtgaaatgaaataagctttcaaagcatgaaaagacataaagaaaccttaaatttatattactaagtaaaataatccagtctgaaaaggctacttactgtataatttcaactatatgacattctgaaaaggcaaaactatggagacaatgaaaagatcagtggttgccaaagttctgggggataaagcaagggatgaataaggagaccacaaaaggtttttagggtagtgaaactattctatatgttactgtaactgtggctacatgacattatggatttgtcaagagccacagaactgcacaacacaaagagtaaaaccctatataaacaatgaactttagttaataataatgtatcaatatcagttgaacaattttaacaaatataccacattaatgtaagatgttaataacaggagaaatgggagaggtagcaggtatatgggaactctgtactttctgctaaacttttctgtaaacctaaatttactctaaaaagtaaagtctattaatttttttaaatctataagcaaaaatgtatgcatacatagcatgcttttgattaagaaaaacggggcagaaaacataggaaggataaaccagaaaaacgttagattacctatatggggtgggtagaaagagcagaaggtataggaaagaggtaggatttctctgagtatacctgtttatatagttttgatgacatattaatattttatataataaaaacaaaactaaatcaacaagaatgttgtggaaagtccttataatttgctaaaaacaaaaacatataaacctaattatatatcaaatagataactatatagaataaaataaaaacaaattaatccaagaacgttttgaatacaatactgtttccaccctcagtggaaatattctaaggaccaaaataaccgcaaataaaccttgaatttcacttggtaaatttggtggcattgctggtattgtacagcaatttaagtgtgtgtgtgtccgtgtgtgcatgtgtgttgcacaagcacatgtacatgtgttaaaaatgagtaaataggcggttacactgacactattgggaactgggattttcaccatgaaagaaaggaaatacaaatatggattgaggaacagacagaatttgtggctgaagagaataaatccatgacttaagaaaaaaaaatgctttctaccattacctactaaaaggttcccgaagcaataacactctacagcaaacaataagttcctttgctatatatttaagcctcgggtttatgaatctaacattgcgtcttatctgtagttgggacatgctgtttcattcttggaaaatttctttttcctcttttttacctgcttaatgcttactcattcttaatgtttcagctaaatatgactatttctggaatataataaattaccatcgatttctctccttaaggcctatgatgacttcacactacttaatagatatccagatatacacactctgcccatggttttctttatcagattgtgctggactatcttatctagcttgttttcttcctactgctgttctgtgtgtgtgtgtgggtgtgcacgcacgtgcgcaagcacatgtgcgtgctctttattagctctaacagattttcttatttttcaaatttattcattcacttattttttcattcattcagattcattcaatgacacaggcagtgtgccagtgagtctcccaagttccattctatacttgggaacatttcattgcccccctgccacccacttcacacagacacatacgtgtgtgtgcatgtgtgcacatgtgcacacacactgctgaaattctacttctgtaaattcttcaattaatggaagagaagtcaccatttttccatgtgttttttctttctaaaattgtgccatccatgaatctaccattcaaataacagtgattcttttcataaataattacttacttaatttatgttttgctcagctctatctcttcagtgctgactttcttaagctataaaatcctggagagtaaaaatatatgccttttcatcccctttgcccttagtccagcacctgagaagccgttaagaaataccaacaataataatgcattatgcacagtggttgcacaataaatattgacagaatgaaaacaatacccttaataaatgtgaaagaacagagtcttcttgtattgctgttttaaatatcccgtaacttctggtcaaatctccttacttgctaaacgatacaaaaattaagtaatttgtaagacttgctcaagattttatacttcaggatagagtgtatattcatcaatgcaagtaactaaaatgtagaagagtaaaatgaattttgataaagttattccattttaatttcaacacacaggtgctggcactgataaatgtaacctgaaggtttaattcagagaaatctttgccttcaagcatatttaaaataagctgtttgcattttcctgcatataattattctaaccctgaaagcaccttttaaatatggattacaaatccagctgccttaaaatgaaagtaaaaggttttcctttctcagtctattttgtaagttggaaattaatgtaacagaactattttgagcttagagagttaaaccttctgactaaattcatgcttaattttttaatgtatttgtgagtttaccaaggtttgcacagaagacaacttttaaaatatcaaaaaaattaacaatgcttcatttttttaacattgtaatttttaaaattagtcatctctcctcctagagggatacttcacaaaagaggcatcccttgatcaggcagggtttactcagccaagtgcttggaatgaacccagaggaaccaaaagccctgatatttctggtatttatttgcaagaaacagtagtctccccatacccataggggtgagttccaagacccccagtgaatgcctgaaactgaggatagtacccaatccaactgccatcaataggaacatgcttcttttcatgtattctactcacaaactgaaagcctttgccatattgactaaggatttattacacactgtggctgtaccttttgcagtttgaggtgcaacaacaaagcgagcacgaattttttttccttctttacaatttcatgaatggaagtctcatccctaccatagatcttagcaacctcagcacataatattttttttctttattgagaactttcaccttttcacttaaagcactttacagcttctccttagcatatcccaattgccagcatcattacttttgtagtggtaccacaggtaactgaaaccacgaaagtgaaaccctggataaaggggaactactgtattcccattctaattgctaggatcctgttcctaactggaaactaactttagaatatgctagagaatttatgttctgcaattcaataaaacatgtgattgcccttgacagtctcaggtcattgacttgaagcagaaagttttgcttaatgactacagagcagtcttccaatccccacctgctgaactggtgcttatctcttacttgtaatatcttgtaaggaatgcaagaaacctacaaactctactattctgattatttctacaaaggtgacctttggtgagtacgtggtctaagtcccaagaaacaacacattatagtttaactttgttaccacacttcaataattgtttctcaacctggtatatagaaattctaaccaggctcctgatccattttgcctatttcatatcttagaatctcttggttgtgccaccacttcctgacaccagttgagacactttggggttgcaagtgggtttgcactttggggttgcaaaatccaactcaaactagcttaatcataaactggaatgtattatctcttggaatccagggaaatgctaaacaatagtatatagatgagcctcaataaaaatgaaccaacaacagatatgctgctgctgctttttttaaatcttgtatttttttatttttatgggtacatagtaggtgtatatatttatgaggtacatgagatacttttatacaagcatacaatgtgtaataatcacatcagggtaaacgaggtatccaccacttcaaacattcatcatttctttgtgctacaaacattccaattgtattccctcagttattcacaaatgtacaacatattattgccgactacagacaccctgttgtgctattaaatactagatcttattcattgtatctaaccatattcttatactcattaatcatttccccatccccgcccccaacactaccctttcccagcctctggtcaccatcattttactctctgtccccataagttcaattgttttgatttttagatcccacaaatgagtgagaacatgcaaagtttgtctttctgtgcctggcttatttgactttatataacgtcctctagttccatccatgttgttgcaaatgataggatctcactttttatgtctgcatagaactccatcatgtatatgtgccacattttctttatccattcatctgttgatggacacttaggttgcttccaaatcttggctattatgaatagtgctgctgtaaacatgggagtgcaggtatctctttgatatactgatttcctttcttttgagtttatatctagcagtgggattgctggatcatatggtagttctatttttagttttttgaggaacctccatattgtcttccatagtggctgtactaatttacattcccaccaatggtgtatgagttttcccttttctccacatccttgcctgcatttgttattgcttgtctttttaataaaagccattttaactggggtgagaggatatctcattgcggatttatttgcatttatctgatgatcaatgatgttgagcaccttttcatatacctgttggccatttgtatgtcttcttttgagaaatgtctattcagatcttttgcccatttttaaatcagattgttgtatctttttcctgttgagttgtttgagttccttatacactctagttattaatcccttgttataggggttgtctgcaaatattgtctcccattctgtgggtcatctatttactttgttgattgcttactttcctatgcagaaggttttgtttgattgccttttttttatttgagacagcgtcttgctctatcgctcaggctggagtgtagtggtacaattatggctcactgcagcctcaacttcccaagctcaagcaatcctcccacttcagcctcccaagtagctgggaccataggcatgcaccaccaaacccagctaattttttttttttttttgtagaggcagagtttccctatgttgcctaggctagaagctttttaacttgatgtgattacatttgtccatttttgctttggttgcctgtgctttggggttattactcaagaaatcttcacctagaacaatgttctagagagtttccccaatgttttcttttagtagtttcatagtttcaggtcttagatttaagtctttaatccactttcatttgatttttgcacatggtgaaagacagggtctaatttcattcttctgcatacagatatccagttttcccagcaccatttttgcaatttagatttcattctctttcattataaattttgtttctccacaaggcaagaaacataaccatcaaacatctaagttttatatcttaaagtttctttggccattaaaggaaacattgactctctttctcttgattccagttttaaatttcctgaaaataattctgattggcctgacttgaattagatcaatctgaaatattccattgttgagatggcataaagtggccaactgtcctggtttgcctgaaactaaagggtttcctgggatacaaatgcattgactctgatactactgttgattatttgtaatagtaaatgaaacatcatgtctaatgtattctgtgtgcttcaaatctttttaaaagaaactgaattaactaactggcatccattgctcttctcaaaaatgtttttatattttgactgaaacccaccatgtgttatggttatctcctttctttacgtttcagtatccctgaaacatattatcctgtttcacgcctcgtatctttacatatggtatttccacccctccctccttattcatgtgtcataatcctcttcatttaaactcagctcagacactgcttttgtgaagtcattgtgaatcctgttctcctcccctgggagagttagtcattccctgttttgttctctactcccaggatatatttctgtacttgtctcataattctgttttataatgatttatttacaaatatatctcatcactatcctataaggtatatgaggccacatctttatattcccagtgcctagcgcaaagcctggcataatggcagtatccccataaacgtttgataaatcgaaaaatctaaaataggaatattttaaatttggtttggggcatcaggtatcatgtacctattatttctatgatcagtctctgaataatagccagtatatctggcatatttgttaacatttaaattacaaatgatagcgtatcaagaataatgtgattactaaaaccagtaacgtgatttgggcctttaaagaagttaatttcaagcttgactttgctgtaggcccaaagtttataacttgttcctaaatagaagttaaatgataccaaaatagatgtataaataagaacagaaagtatgaacataatcagccctgttctctgacaggtgggttggaggctgaggatgcatcaaacagtaaggaaagtcctctgtgggctaacgtgggagggataatttggcttcctctctccacaggcagatggaggccttttccccctgcatagtttctgagaatgcaatgaggaaagatgattgggatgctcatgtggaacaagcatactatttggcttacattaaaaaatagaatgaaatgagtatccctagggagaactaacttacccaagacacttcaacatttctagactcatttctctgaaacagtctagaaatagaaatatatacacatattagactacatctagaaatgtatttgtatatgtatttctagacacacacatacatacacatacattacataatatatgcatacacatacatatacacacacacacacacaaactctctaatgaaaactgtgccaatttcaaaagtgaagctaaattatatttcagttatgctcccttgcatcacaaaatgaggctctccagcttaatattggcattcccaagccaggtcaagaaagtaggaactgataagctgtctggtataatagttctctagctaaatctctagaaaggtgctgcatctgacatttcttcaaattagaggaaatttcataagacttggtagggaaaaatatgtcagatgacagatatgtatatcttctttcacttttgcccaaaacgtcattaaaatgatagaaatatatttgtaaaggcataaagacataaagacaagcagaacaagaaaggaaactacagtaacaaaattctggatgctataaagtagttacatgacaaatgactaagcagacttgagaactggatccaaagctagccatagaaaaaactaaaaatcaacctggtaagactacagaggactcatgaattccataccagatatgtctgaaagaataggtgaataaaaaggcaaaaatagcaactatgtgaaagaatattttaaagcagttagattcccatatgcctttctcactctatagcctggtgactatccgtccctcaatcttgcaaaacactgaagatttcttctcttagaagagtaaaacagttctctaaactaatcacagtttagggtatggtaagataatgaaaataggtgattgagaaaacaggtatactggatgttgacattcctgtgtgccctctttccttaaacagccctaagaacttcccattaggagcttaaaagagggatttcctaggatgttccggtcaaaaggaaagatctaaagatgctgttgtcaagacttctccaactaaacggaccaatggaatcaacctaaagcaaagcttatagtgacaatggcatctagaagacaatatggtcattgttttaatttctctagggaatttattctcaacactagaatttcacatccagtctatgaagcaagagtgaggacagaataaagacatttgcatgaaattactgggagatgtgctgcataaaacaagaaaaggcatggcatacagaaatcaagatatccaacaaaggaaagaggcaataaaaatccccaaatgatggagaagaattgcaaggttgatacctatcagaaggagtagaaggtgaccagtccggatttaaatgaatggaaaggctcaggtgagattcttcagagacatgaagcatatagaatacctgatacacataaacatgttaagaaaagatgaatctggaattgtgttgactatatatacatagaaaatcaatcacaattaggaaagacaataattaatcctaggggaaataaaacattgtaatggaaaggaagaggaatcagggtttagcctatggatcagtaacattataaataatgtctgtcgacaaacataacaagtaaatagagaagactaatctaacccaaattttgcaattaatgtgttaaagagatagtcatggaaaacatgtgtgtgcttgtgtggggtactgttatagtaagcggtaggaaagagaggaatgccatattccatagtgggatgtcaatagataatgtctaaaactgaaacattaaaaaggagcaaaacaaatagattagagacataaagataaatacccagataactagataaaagagatgaaggtgttgggaggaagagaagaagatggttggggtactgctttttaaaataataataaataatatataaatatttgacaattcaagtaaaatcctctaaaacttatataatcttgactttatgatattatataatttacctaaattgaatgcatcaattctcacccataattactttttgtaagctcaaacattaagaatttggcaatgtcttataactcgcttctgtgttagggacctatggcagaaaaactctgaaattacccccaattatccctgtttctcatgcctttgtgtaatcccctccccttgagtggaagcagaacctctggtttgtttctagctaatagaatatgacaaagacaatggcatgttaattccatagttatgtcacataagattgtgacttccattttgcaaacataccctctgttgattctctccctttctggctttgatgaagtaagctaccatatggaaaggccatgtggtaaggaactaagggaggcttacaaactgaggctctcggtcaaggaattgaaagcattcagcaaggaactggggtcctccattgacaaaccacaaggaactgaattctgccaacagccatgtgagcttggaaccagatccttccccagtcgagccacagacgaggtcccattcctgggtgacaccttgattctagtcttgtgagagaacatgaaacacaggacccaagccatgcttgaatacctgacacacgaaactgtgagataataaatattttgcataaggcactaaatttgtggtaaaatggccacacagcaatagatgaataaaggatctaaccaaaagagaccatgatttgagcacctctccaactcaggtgttacaaaacaaagattgttgagttctgcttgtcagaggtatgaattctgactgattgcccaagcctccagtttgtttgcatcatccagctacttaagctgacactgctacacctaaggttcagcacggcaacctcagatgacttcattctgggctacgtcatccagaagtcataaaattatctcccaaatattaaagaatttaaacaaattactatctttagcagtgccaatcaaatgtcacccaagaggtaaagtaatattcacttcagtattttagagggaaaagtcataagaggtaacacataatagaaatcttctatttaataaaatgttaagagtagatgggaaaaatcaagtttttcaccctctaaaaagcatacattctaattacaacacattaaatatttaacaaatcctgagttctaggtaaatggaaaggaaatttcctttgcttttaatttagaataaaaggtgatatgtgggtggtgaaatggtgcagcttacagtgcctacattattgtacagaaagaaagggcagcagggagctagaattatagaagcaggaaaaaaatggtatgacaaccaggtaggcagcaatagccatttgactctctacctaccagctctcataggcttcgctgtcttagagttattataactatattgctaaaggaaaaaaaaagtgtggttatttgttacttagctgtccttatcacactgactcagaaatcaggtgtatgtgtgggagaattttcaaaagaaaatccacatacagctgtgaatcactcacctgaagaacaatgagccaaatgggcaatcactgagacaaactgtcacttatcaaaactctataagcaatgcggaggttaacctgggggtctgaatctgtcagtgccaagtttcttccagctgtcacaatcagacaagctgcctccatcataaaataatgcaagccaaattcaactgagtgggactcaaagaaacatctgaaattcaacaacagcagccttgccatctagactattttgtgacaaagttgatgacaaggggttggaaatgacagaatacatcagtatggaagtctctctttaatgacccgatgtcatgaatgaagcatgaaggacaagtgactaaacacatatcattcttatttaataccatattgaggactaaggctcacattatcctctacaggtactgcttggatcctgtattagtttcttttgctgctgtaacaaattaccacaaatttagtggcttaaaacaatacaaatgcattctctttcagctctggaggccagaaataaaaagtcagtttcactgggctaaagtcaaggtgccacaagggctgcctcctctagaggatctgggaataatctgtttcttgactcttccagctactagtggctatgctatgggtattcctcattggctctggctcatggccccttcctcccatcttcaaagccaacagtttagtatcttctatcattgcatttccttattctttctgtagtctattccccctctacctccctcttataaggacagttgtgattacatttagggtccacccagataacccagaattatttccatatctcaaaatcctaattcacatcacatctgcaaaggctcttttgctataaaaggtaacattcacagtttccaggaattccaacctggatatttttgggagctattattcagcataccacaggtcctgtctcataaatgttttaattggaagctgttcgtctgtggtaaagagtttattactcatatacaaagccatctaaaatacaataaatgtaaattaattagagattgaaaatcaatagtattttgactcctaaacactttattaattgttctgggaaatttttgagccatttctcttggtaaacataatgtaaaaaaactaaagagcagattttagtgggtcaatattatcttggcaatctcatgaatactgctgtgtgtgtgtgcacgcacacatgcacacataagcacacgcaagcttgtgagggtcaggagattggataaaggtatactaaaagtgaacacttaaagaattctaatgatacctgcatgctgtactcatggaatgattcacactataacaactatgggtgctggaatgtacttcagtaagcatcaggcaattttaattcaaaagactctgagcagattttgaagcagttgctctgacacctgagggtgtaaccatgtttgaaggtgtgtgggatgttgagaggagaaggaactaacttttattaaatggctactatgtttcaggtacagagttacaggttttacaaattttaatgttaattaaggctcacgacaacagatgctgcaggtattaaaagaagataataatacccagagaggattaggtaacttttccaagtttgccagctagcaagtggtatagctagacccacattttttgaaatctaaatatccataatggggttttagcatgttagagcagatataggagaggtcaagagtcaagaaaacacaatggttctttcagaagagctctggggaaaaaaggaatgagacaaggggaacaacattatcacacactgcaccagctgactatagtggtaggtcataatgactgcaaaacagtgtgctgggccccatttagtgatgacatcacaatacataactctaagcaaataatgtttctacttctgattcctatttcactgctttgaccctccatcacttacctgggcacagagtattcatggtatcacttctccccataaaatgggtttgacaaccaagcccaatttcttacttcatcctcagatgtagccttatacctttaaatgaacagagattaattgcatagattttccataatggggctcattcattttccgtattatagtatctactttctaaagctgattttactgagatctaattttccagctcatgccactatagaaatgactgttaaaaacttgatccaacaggaatctgagtcattgctacaatgggaaaacatctgtaccataaagaagacaagattgtcatttcattagaattcctcttgactttaaaccattaatctttgtcaataatgggatattcatttgcagctcactaactggaataaaactgaaagtgataccatcaagatatacataattctttgataaaaccacagctttagggtccatgcctccaaggataattaaagaaatagctgttggtgttctgagtctgcttgagtaacctatagtttatgggataaaagagatagattaagacagggcgaatccaggccaagacttcactgagatctcaagtctatgtattgtgaacatatgttttgtgggggaaatgaattaggtaagacatgtcatgaaacgaaggactgagagtcaatgtggttttttctttataataccttcagtagcaaaaattcctttccttatttataggcatcctttcatactttgcctttatcatagagaagaatatatctctggtcctttttagtcaatatctatgaacagctgaaaatacaatgaaagtaagaattgcttcccaaagttcctgtttgcatttccgtttatttacatatgttcctttagacctatatagacccaaaacaacctgagataaatgccactcataactgtatccctcaggggagcatataattaacaaaagcccatatatttgagcttaactgattaatcattttccctcaactctttccattataattcagtttgctttgtgttaattcctttttttaaataatctctcaactcctcctatcacccaggctgaaaaacccaggaatcaccaaagaccctctccctcaactcctgcagccaaagcccagtccaacagaatctatccaacttccttatttcacttttccagctctgattggatttgtatctataataaatcaaaaagaggtcaactaagaacaaaactaacatcattagaataaaatcaccttataaactggaatgcaaggtgctaatgttattacttttcattctgataaaatcaccttataaactggaatgcaccatgctaatgttattacttttatcttttttttagtttgtactgcacatcacagttttaatttttttaacttttaagttcatggttcatatgcaagtttgttatataggtaaatttgtgtgatgtgggtttattgtacagattattttgtcacccaggtactaagtctagtactcattagttatttttcctgatcctctccacccttccagcctccaccctctgataggtcccagtgtatgttgtttccctctatgacttaaacaaaatgacaaaaaagagcaaacaaccacatttaaaagtgggcaaagaacgtgaacactttcctaaagaagatatacctgtggccaacaagcatatgaaaaaaagctcaatatcaatgatcattagagaaatgcaaatcaaaaccacaatgagataccatctcgcaccaatcagaatggctattattaaaaagtcaaaaaaatagatgctgtcaaggttgcagagaaaagggaacatttatacacagttggtgggaatgtaaaattagttcaaccattgtggaagacagtgtggaaattcctcaaagatctaaagacagaaatacaattcaacccagtaatcccattactgcatatatactgagaggaatataaatcattctgtcataaagacatgcacacatgtgttcattacagcactattcacaaaagcaaagacatggaatcaaactaaatgcccatcaatgatagactggataaagaaaatatgctacctatacaccatggaatactatccagtcataaaaaataatgagatcatgtcctttgcagggacatggctggagctggaggccattatccttagcaaactaatgcaagaacagaaaaccaaacattgcctgttcgcacttacaagtgggagctgaatgatgagaatgcatggacacacagaggggaacaacatattatttttatctttacttgaaaagtatgtcttgatttcctccatataaaattcaagaccttggggatgcagacaaaataggttgtttcatgtggggtttatgataggctgaataatagccctttcaggatggctacatcctaataaccagaacctgtgaatattttaccataaacacacatcacaaatggacctatgaagctacaattaaggttcctgagagtgagagattattatggattatctggatagacccaatgtaatcacaagagtccttaaagaaggaaaaaagggtcagagtcagacaaggtaatgagaagagggcaagggccccaatagtctcaaccccttataacatacattcaaatacaaaataccatctaaatctcatcagcttaaaagtcccaaaccttatcatctaaaggatctatgggtgaggctctggatataatctatcctggagaaaaatacctctccatctgtggatctgtgaagctagaaaataagttatcagatcaaaaagtacaatggtggcacaggcataagataatcaatatagacattctcattgggagaaaatagaaggggaaaaaggggtcactattcccatgacattttgcaatccaactgggaaaattctatcatgtttcaaaacccaggaataatcctctgtggctggagggtccatcctctgggcccgtggctctgccatgacctcagagttatccttcttttcatgaagggtaatgtgtctaaacctgagttattttattagcctgttttctaactggagaattttggaagtcaaacaaacttctatcattttgttctttctctgtctctttcagtccaagctggcagtgtttctgctgatacaacattctcaaaaactttgtgggtctcccacacatgttacagggagtaaatccatcaaacaagaggctcttccacaaatatatgcaggataatcccatttttattcctggctcctattgagatctgtgaggggatccatgagtcatatacttaatcttttcaaacacttttctgtgtgattaaaatactgaccttatctaaaatcgttccaaggcacaagcaaaagactgctcagccaaacctttggcattctctccagagcatactttcttgtaatcaaatcttctaactttagcagtttttgaaagctgaatagactgagaatttcctaaattatcaagtcctagttcctttttgtttaacagttcttcccttaatctatgtctttcctctcacattttactataagaaacaagaaaccaagccacattttcaacagtttgcttggatttccaagcaaatttcctcggctaaatctccacgctcatggcttagaaattctatttcccacatgactgcagaacaaaattctgctgagtcttctgccaccaaataacaaagaacccttaattccatctgggccattatgaggagttcctttagtattcctatttctatagtttatttataatagctttaatattctctaagacaatttaatttttctctattatgttcctcacttccttctgagcccttactagcagagtccttagtatctatatttccactagcaatctgttcacagaaatctaggcttttctatcatgctcctcaacattcttccagcctcttcccactggaaatcacaaccacatttttaggtatttgttagcgcataacctcacttccaaatctatgttagcttcctacttctgctccaataaattctcactaacttagtggcttgaaacaatgcacatttatcttctttttctggaggttagaaatctaaaatagattttgaaatgtactgacatttatgagtcttacatgactaaaattaaagtgtcataatcttcattccttatggatactttagggaaggatccattccttgcctttcccagcttcaaaaggccgcccgcattccatggctcatggctacatcacttggatctccgcttctgtcatcacatctctttctctccctctgcttctgtcatggcattgctttttatgacactacccctcatgccttcttctcataagaacccttgtgatttgtctggacccacagaagtaatccaggataatctcaagaacattaacttaatcacctgtgaagccctttttgctatgtagtcatacctcattttattgtgctttgctttattgctctttgcacatattgcctttttacagattgaagttttgtcacaaccctgcatggagcaagcctatcagcaccatttttccaacagcatgtgctcacctcatggcttggtgtcacattttgataattctcacaatatttcaagttttttattattattatattttttgtggtgatttgtgatcagtgacctttgatgttactactgtaatcacttgaggcaccatgatccactatcacatagaatggtgaatttaatcaataaatgttgtatgtgttctgactgctccaccaaccagcctttgccctgtcttgttctttctccttgggcctcctagttcctgagacacaataatattgaaattagactgataaataaccctataatggcttctactgttccagtgaaaagaagagtcatacatctcattttaaatcaaaaactacaggcccagtgcagtggttctacctgtaatcccagcactttgggaagccaaggcagacagatcacttgagctcaggagttcgagaccagcctggccaacatagtgaaatcccatctctattaaaaatacaaaaaaaaaaaaaaattagctgggcatggtggcaggttcctgtaatcccagctactcgggaggctaaggcaggagaatagcttgaacctgggaggcgggggttgcaataagcagagattgcaccactgaacttcagactaggcaacagagcaagagtccatctaaaaataaaaaataataaataaataaataaaaagctacaaatgattaagcttggtgtcaggcctcgagcccaagctaagccatcatatcccctgtaacctgcacgtacacatccagatggccagttcctgccttaactgatgacattccaccataaaagaagtgaaaatggcctgttcctgccttaactgatgacattgtcttgtgaaattccttctcctggctcatcctgactcaaaagctcccctactgagcaccttgtgacccccaactcctgcccaccagagaacaattcccctttgactgtaattttcctttacctacccaaatcttataaaacggccccacccctatctcccttcgctgactcttttcggactcagcccgcctgcacccaggtgattaaaagctttattgctcacacaaagccagtttggtggtctcttcacacggatgcgcatgaaatttggtgccgtgactcggatcaggggacccttggagatcccttgggagatcaatcccctgtcctcctgctctttgctccgtgaaaaagatccacctatgacctcgggtcctcagacccatcagcccaaggaacatctcaccaattttaaatcgggtaagcagcctcttcttactctcttctccaacctctctcactatccctcaaccactttctcttttcaatcttggcaccacccttcaatctctcccttctcttaatttcaattgctttcattttctggtagaaacaaagaagacacattttatccgtggacccaaaactcaggcatcagtcacagacttgggaagccagccttcccttcatgtttaatcattgcagggacgcctctccatttacccacgtttcagaggtgtctgaccacgcagggatgcctgcctcggtccttcacccttagcagcaagtcccgcttttctgggggaggggcaaaaaccacaaccccttctctccctgtctctaccccttctctgcttttctggggtgcaagaaccccccgatcccttatttccgtgccccgacctcttatctctgtgccccgatcccttatttccatgccctgacctcttatctctgcaccccaattccttatttccatgccctgacctcttatctctgcgccccgatcccttatttccacaccccgacctcttatctctgcaccccaaccccttattttggcgccccgacacctttcccacttttctggagggtaagaacctccgaacctcttccctccatgtccctactctctcttttctctgggcttgcctccttcactatgggcaaccttccaccctccattactccttcttctcccttagcctgtgttctcaagaacttaaaacctcttcaactcacacctgacctaaaacctaaatgccttattttcttctgcaatgccgcttgaccccaatacaaactcaacagtgattccaaatagccagaaaatggcactttcaatttttccatcctacgagatctaaataattcttgtcgtaaaatgggcaaacggtctgaggtgcctgacatccaggcattctttcacacatcagtcccttcctagtctctgttcccaatgcaaatcgtcccaaatcttccttctttccctcccgcctgtcccctcagtcccaaccccaagcgtcgctgagtctttctaatcttccttttctacagacccatctgacctctcccctcctcgccaggccgagctaggtcccaattcttcctcagcctctgcttctccaccctataatccttttatcacctcccttcctcacacctggtccagcttacagtttcattccgtgactagccctcacccacctgcccagcaatttactcttaaaaaggtggctggagctaaaggcatagtcaaagttaatgctcctttttctttatcccaaatcagatagcatttaggctctttttcatcaaatataaaaactcagcccagttcatggctcgtttggcagcaaccctgagatgctttacagccctggaccctaaaaggtcaaaaggctgtcttattctcaatatacatcttattacccaatctgctcccaacattaaataaaactccaaaaattaaattccggccctcaaaccccacaacaggacttaattaacctctccttcaaggtgtacaataatagggtagaggcagccaagtagcaacatatttctgagttacaattccttgcctccactgtgagacaaaccccagccacatctccagcatacaagaacttccaaacgcctaaaccgcagtggccaggtgttcctccaggcccgcctcccccaggagcttgctacaagtgccagaaatctggccaccaggccaaggaatgcccacagcccgggattcctcctaagccgcgtcccatctgtgtgggaccccactgaaaattggactgttcaactcacctggcagccactcccagagcccctggaactctggcccaaggctctctgactgactccttcccagatcttctcggcttagtggctgaagactgacactgcccgatcgccttggaagccccctagaccatcacggacgccgagctttaagtaactctcacagtggaaggtaagtccgtccccttcttaatcaatacggaggctacccactccacattaccttcttttcaaggcctgtttcccttgcctccaaactgttgtgggtagtgacggccaggcttctaaacctcttaaaactccccaactctggtgccaacttagacaatactcttttttttttttttttttttttgagacggagtctcgctctgtcgcccaggctggagtgcagtggcgcgatctcggctcactgcaagctccgcctcccgggttcacgccattctcctgcctcagcctcccgagtagctgggactacaggcgcccgctaccacgcccggctaattttttgtatttttagtagagacggggtttcaccatgttagccaggatggtctcgatctgacctcgtgatccgcccgcctctgcttcccaaagtgctgggattacaggcgtgagccaccgcgcccagccgacaatactcttttaagcactcctttttagttatccccacctgcccagttcccttattaggccgagacatttaactaaattatctgcttccctgactattcctggactacagctgtatctcattgccacccttcttcccaatccaaagcctcctttgcgtcctcctcttgtatccccccaccttaacccacaagtataagatacctctactccctccttggcgactgatcatgcacccctcaccatctcactaaaacctaatcactcttaccccgctcaatgccgatatcccatcccacagcatgctttaaaaggattaaagcctgttatcactggcctgttacagcatgggcttttaaagcctataaactctccttacaattcccctattttacctgtcctagaaccagacaagccttacaagttagttcaggatctgcgccttatcaaccaaattgttttgcctatccaccccatggtgccaaacccatatactctcctatcttcaatacctccctcaacaacccattattctgttctggatctcaaacatgctttctttactatgcctttgcacccttcatcccagcctttcttcgctttcacttagactgaccctgacacccatcaggctcagcaaattacctgggctgtactgccacaaggcttcacagacagcccccattacttcagtcaagaccaagtttcatcctcatctgttaccaatcttggcataattcttataaaaacacacacgtgctctccctgctgattgtgtccgactaatctcccaaacctcaatcccttacaaaacaacaactcctttccttcctaggcatggttagtgcagtcagaattcttacagaagagccaggactgcaccctgtagcctttctgtccaaacaacttgaccttactgttttagcctagccctcatgtctgcgtgcagcggctgccgctgctttaatacttttagaggcccttaaaatcacaaactatgctcaactcactctctacagttctcataacttctaaaatctattttcttcctcacacctgacacatatactttctgtttcccggctccttcagctgtactcactctttgttgagtctcccacaattaccattgttcctggcccagacttcaatccagcctcccacattattcctgataccacacctgacccccatgactgtatctctctgatccacctgacattcactccattttcccatattctttcatgttcctcaccctgaacacacttggtttattgacggcagttccaccaggcctaatcgccactcaccagcaaaggcaggctatgctatagtatcttccacatctattattgaggctactgctctgcccccctccactacctctcagcaagccgaactcattgccttaagccctcactcttgcaaaagcactaaaagtcaatatttatactgactctaaatatgccttccatattctgcaccaccatgcgagaggtttcctcactacacaagggtcctctatcattaatgcctctttaataaaaacgcttctcaaagctgctttacttccaaaggaagctagagtcattcactgcaaaggccatcaaagggcatcagatcccatcgctcaggacaatgctcatactgataagatagctaaaaaagcagctagcattccaacttatacccctcactttcagtttttctccttctcatctggccactcccacctactcccccgctgaaacttccacttatcaatctcttcccacacaaggcaaatggttcttagaccaaggaacatatctccttccagcctcacaggcccattctattctgtcgtcatttcataacctcttccatgtaggttacaagccactagcccatctcttagaacctctcatttcctttccatcatagaaatctatcctcaaggaaagcacttctcagtgttctatctgctattctactacccttcagggattgttcaggcctcctccctttcccatacatcaagctcggggatttgcccctgcccaggactggcaaattgactttactcacatgccccgagtcagaaaactaaaatatctcttagtctgtgtagacactttcactggatgggtagaggcctttcctacggggtctaagaaggccaccgcagtcatttctttccttctgtcagacataattcctcagtttagccttcccacctctatacagtccaatagcagaccagcctttattagtcaaatcagccaagcagtttttcaggctcttggtattcagttaaacctttatttcccttacagtcctcagtcttcaggaaaggtagaacggactaatggtcttttaaaaacacacctcaccaatctcagccaccaacttaaaaaggactggacaatacttttacctctttcttttctcagaattcaggcctatcctcggaatgctgcaaggtacagcccattggagctcctgtatggacgctcctttttattaggccccagtctcattccagacaccagaccaacttggactgtgccccaaaaaacttgtcacccctactatcttctgtctagtcatactcctattcaccgttctcaactactcatacatgccctgctcttgtttacactgccggtttacactgtttctccaagtcatcacagccaatatctcctggtgctatcccaaactgccactcttaactcttaaagtaaataaataatctttgctggcagggctatgctgaacctccttaggcactctctaattagatgtcctgggtcctcccaattcttagacctttaatacctgcttttctctttctcttattccgttcagtttttcaattcatacaaaactatatccaggccatcaccaataattctaaatgacaaatgtttcttctaacaaccccacaatatcaccccttaccacaaaatcttccttcagcttaatatctcccactctaggttcccacgccgcccctaatcccactcgaagcagccctgagaaacatcgcccgttatctctccataccaccccccaaaattttcgtcgtcccaacactttatcactatttcattttatttttcttaatataagaagacaggaacgtcaggcctctgagcccaagctaagccatcatatcccctgtgacctgcacatacacatccagatggccggttcctgccttaactgatgacattctaccacaaaagaagtgaaaatggcctgttcctgccttaactgatgacattgtcttgtgaaattccttctcctggctcatcctgcctcaaaagctcccctactgagcaccttgtgacctcccactcctgcctgccagagaacaacccccctttgactgtaattttcctttacctatccaaatcttataaaacggccccacccctatctcccttcgctgactctcttttcggactcagcctgcctgcacccaggtgattaaaagctttattgctcacacaaagcctgtttggtggtctcttcacactgatgcgcatgaaacttggtgaagtatgtatgtcaaaagctgagataggctaaaacctaggcctcatgtgccaaacagttagtaaatgcattatgtaagaaatacatttcaagttgtgaatgcaaaggaaaagttcttgaaggaaattaaaagtgcgactccagtggacacataaatgataagaaagggaaacagcctgaatgctgatatggcaaaagttttagtgctctggaaagatcaaaccagccacaacatttacttaagccaaatgctaatccagaacaaggccctaactctcttcaattctatgaaggctgagagaggcaaagaaactgcagaagaaaattttgaagctagcaggggttcatgaggtttaaggaaagaagccatttccatgacacaaaagtgcaagaagcagcaagtgctgatggagaagctgtagcaagttatccagaagatccagctaaattgataaaggtgactacactaaacaacagattctcaatgtagatgaaacagccttctattggaagaagattccatttaggactctcataaccagagaggagaagtcaacgtctggcttcaaagcttcaaagaacaggctcactgttttgttaggttgtaatgcagctggtaactttaagttgaagccaatgctcatttgccattctgaaaacactaaagcttttaagaacgatgttaaatgtactctgcctgtgctctataataaaataataaagcctggatgacagtacatttgtttacagcacagtttactgaccattttaagcccactgttgagacctactgcttaaaaaaagattcctttcaaattattattgctcatcgacaatgcacctaattacccaagagctctgactggaggtgtacaaggagactaatgttttcatggttggtaacacaacatccattctgcagccaatggatcaagcagtaattttgactttcaagtcttatgtaagaaatacagggtgggaccaagatggccaactagccaacaagaagcagccaccgtcagaggctcccatcaaaaagaaccataatagcatgtgaatcctgcactggcaactgaggtatccaggttctctcatcagaactgactaggcagctggtgtgacctacagagagaaaggaagcgcagtggtgcagggggcccacctgagagccacacagggcaggtgggtccccacccccccgccaagggaggtgatgagtgagtgtgccatccagcctgggaaaccatgctttttccacagactgtgcaacctcctgatcagaagatctcactcatgaaatcacaacaccagggcctaggatcccaaccacagagccctgcagattctcaaaagcctctcagctagactctgcttaagcctgctgagttcccggtggggaggggcgactagcaccacagttgcggctgcctgttgtttaagccatttgagctctttgggggaggggcagcagccagcactgggactgatagctgcctaacacactaagctccctgggcaggggaagggtggcagccatctctatagctccaggctacacttttcccctgctggagccaggaaggcttggttccgagaggggtcccccgcagcacaacacaccggctgtggcagactgtggccagagtgcctcttcaggcctgacactgacccatccctcctcactgggaggggcctccctgcaggaactccaactccaggcaggggctcaggcacaaagctctgatctccctggccggagccactaggggtaggggtgaccacagtctctgaggaccagcagacttagcctttcctcctgctagttctgagaaatctgggcagcccagatgagtgggtttcccctcagcaaagcactccccctccaccaagggatagtcaaagagcttcattaaacgggtcctgctccctgtaccacccaactaggtgagaccatcaaacaggggttgtcagacatcctatacaggagtgatcatactggcatcagatcggtgctcctcgaggtcagagttcccagaggaaggaggaagcacccatctttgctgttttccagcctccttgagtgactggctccaggcacaggagcgagccagatgaatagtgcctgaagtgaatgcccagcaaaccacaacagccctacagaagaggggcctgaccattgaaagaaaaacaaacagaaagcaacaacaacagcatcagcaaaaagtgtctccccaaaaaaacccatcaaggataggcagcctcaaatatcaaaactagacaaattcatgaagatgagaaaggatcaacaaaaaaaaaaacactgaaagcccaaaaggccagagtgcctcttctcctccaaatgattgcaatgccgctccagcaagggtgcagaactgggcagaggatgagatggacaaattgacagaagtaggcttcagaaggtgggtaatatcaaattctgctagctaaaggatcatgttctaacccaatgcaaagaagctaagaaccttgaaaaaaggttacaggagctgctaactagaataaccagtttagagaggaacataaataacctgatggagctgaaaaacacagcggaagaacttcgtgaagcatacagaagtatcaatagccgaatcaaccaagaggaagaaagtatatctgagtttgaagaccaccttgctgaaataaggcatgcagacaagattagaggaaaaagaatgaaaaggaatgaacaaaacctccaagaaatataggattatgtaaaaagaccgaacctacaattgactggagtacctgaaacagacagagaaaattgaaccaagctgcaaaacacacttcaggatgttatctaggagaatgttgccaacctagcaagataggccaacattaaaattcaggaaatacagtgaacaccactaagatactccatgagacaatcaaccccaagacacataatcattagattctccaaggtcgaaaggaaggaaaaaaatgttaagggcagccagagagaaagaccaggtcacccacaaagggaagcccatcagactaacagcagacctctcagcagaaacggtacaagccagaagagagtgagggccaatattcaacagtcttagaaaaattattttcaactcagaatttcatatccagccaaactaagcttcataagcaaagaagaaataaaatcctttccagacaagcaaatactgagggatttcatcaccaccatgcctgccttacaagagcccctgagggaagcactaaatatgaaaaggaacaactggtaccagccattgcaaagacacatcaaaatataaagaccaatgacactatgaagaaactgcatcaactagtgtgcaaaataccaaggtagtatcatgatgacaggatcaaaatcacatataacaatattaaccttaaatgtaaatgggctaaatgccccagttaaaagacacagactggcaaattggataaagagtcaagacccatcagtgtgctgtatttaggagacccaactcatggtcaaagacatacataggctcaaaatgaagagatggaggcaagtttaccaagcaaatgaaaagcaaaaagaaagcaggggttgcaatcctagtctctgacaaaacagactttaaaccaacaaagataaaaaaagacaagggcattacataatggtaaagggatcaattcaacaagaagagctaactatcctaaatatgtatgcacccaatacaggagcacccaaattcataaaacaagttcttagagacctacaaagagacttagactcccacacaataataaaaagggacttctaacaccctactgtcaatattggacacatcaatgagacagaaaattaacaaggatattcaggacttaaactcagctctggatcaagtggacctaaaagagatctacagaaccctccacaccaaatcaacagaatatacattcttctcagtgcatggcatttattctcaaattgaccacaaaattggaagtaaaacacttctcagtaaatgcaaaataactgaaatcataacagcctctcagaccacagtgcaatcaaattagaactcaggattaagaaactcactcaaaaccacacaattacatggaaattgaacaacctgctcctgaaggactcctgggtaaataatgaaattaaggcagaaatcaagttatttgaaaccaataagaacaaagagacaatgtgccagaatctctgggacacagctaaagcagtgttaagagggtagcactaaatccccatatcagaaagctagaaagatctcaaatcgacaccctaacctcacaattaaaagagctagagaagcaagagcaaactaatccaaaagctagcagaagacaagaaataactaagatcagagcagaactgaaggggatagagacacaaaaaaccctcaaaaaaatcaataaatccagcagctggttttttgaaaaaattaacaaaataggtagactgctagctagactaataaagaagaaaaaagaatcaaatagacacaataaaaaacgataaaggggatattaccacttatcccacagaaatacaaactaccatcagagaatactataaacacctctatgcaaataaactagaaaatctagaagaaatggataaattcctggacacatacatcatcccaaaactaaaccaggaagaagtcgaatccataaatagaccaataacaagttctgaaattgaggcagtaattaatagtctaccaaccaagaaaagcccaggaccagaaggaatcacagccaaattctaccagccaaattctacaaagaggagctggtgccattccttctgaatatgatccaaacagtgaaaagcaggtactcttccctaactaattttatgaggccatcatcatcctgataccaaaactgggcagagacacaacaaaaaaaagaaaatttcaggccaatatccctgatgaatattgatgcaaaaatcctcaataaaatactggcaaaccgaatccagcagcacattggaaaacttatccaccacaatcaagttgacttcatccctgggatgcaaggctagttcaacatacacaaatcaatacatgtactccatcacacagacagaaccaatgacaataaccacacgattatctcaatagatgcagaaaaggcctttgataaaattcaacatgtcttcatattaaaaactctcaataaactagatattgatggaacatatctcaaaataatcagagctatttatgacaaacccacagccaatatcatattgaatgggcaaaagctggaagcattccctttgaaaactggtgcaagacaaggatgccctcactcaccactccctttcaacataatattggaaattctggccagggcaatcaggcaagagaaagaagtaaagcatattcgaatagaaagagaggaagtcatattgtccctttttgcagatgacatgattctacatttagaaaacccagcatctcagccccaaaactccttaaactgataagcaactttggcaaagtctcaagatacaaaatcaatgtgcaaaaatcacaagcattcctatacaccaacaatagacaagcagaggaccaaatcacaaatgaactcccattcacaattgctataaagagaataaaatacctaggaatacagctaacaagggatgtgaaggacctcttcaaggagaactacaaaccactgctcaaggaaatcagagaggacacaaacaaatggaaaaacattccatcctcatggataggaaaaatcaatgttgtgaaaatggccattctgcccaaagtaatttatagattcaatgctattcccatcaagctaccattgacaatcttcacagaattagaaaaaactattttaaatttcatatggaaccaaacaagagcccatatagccaggacaatcctaatcaaaaagaacaaagcaggaggcatcacactacctgacttcaaactatactacaaggctacagtaaccaaaacagcatggtactggtaccaaaacagacatatagaccagtggaacagaacggagaactcagaaataacaccacacatctacaaccatctgatctttgacaaacctgacaaaaacaaacaataggaaaagaatttcctattcaataaaaggtgctgggaaaactggctagccatatgcagaaaactgaaactggaccccttccttataccttttacagaaattaactcattaaagacttaaatgtaaaacccaaaaccataaaaaccctagacgaaaacttaggcaataccattcaggacataggcatgggcaaagacttcatgatgaaaacaccaaaagcaattccaacaaaagccaaaattgacaaatgagatctaattaaagagcttctgcacagcaaaagaaactatcatcagagtgaacaggcaacctacagaatgggagaaagtttttgccatctacccatttgacaaaggtctaatatccagaatctacaaggaacttaaacaaatttacaagaaaaaaaaatccccatcaaaaagcgggcaaaggatatgaacagacacttctcaaaagaaaacatttatgtggccaatgaacacatgaaaaaaagctcaacatcactgatcattagagaaatgcaaatcgaaactacagtgagatactgtctcatgccagtcagaatggtaattattaaaaagtcaagaaacaatagatgcttgggaggctgtggagaaataggaacacttttacactgttggtgggaatgtaaattagtccaaccattgtggacgacagtatggcaattcgtcaaggatctagaaccagaaataccatttgacccagcaaccccattactgggtatatatccaaagaattgttccattataaagacacatgcacacatattatcactgcagcactatttacaacagcaaagacatggaaccaacccaaatgcccatcaatgatagactggataaagaaaatgcggtaaatatacacgatggaatactatgcaaccataaaaagaaatgagaccttgtcctttgcagggacttggatgaagctggaagccatcctaactaactaactaacaggaacagaaaactaacacaggaagagaaaaccaaacaccgcatgttttcactcataagtgggagctaaacaatgagaacacatttagcggacaacagcatagtgtaaatacaacttttatatgcacttggcaatcaaaaaattcatgtgagttgctctactgcagtattcgctttattgcagtggtctataactgaatctgtagtacctccaagatatgcctgtgtaaagcaacatattcacagttctgtgtattacaatatgaacatctctgacatgaaaatatgcataaatttctcacattttataagaagtttttattcatctttctatttgaaagacgctttttccgagtataaaattctagatcaacagctaatttttggcaccttaaagacagtccattgtctttctgggtcacaaagctagtggtaagaagtccaccatcaccctcatctttgttcctctgtaagtaatgaagttttggagtaatgaagtagtttgtaagtaatgaagtcttgaagtttgccattttttttcttctggcaatttaaattttatagttgaggttcttagagtgaacttttcatttcagtaattgtacttttgaactccagaatttctatttgatttttttaatcatttctctctattgatattctctatttgatgcaaaattgttgtcctaccttcctttatttaatcatagtttcctttagttctttgaacatatctacaatggctactttctagtcattttctgttagtctgatttctgaccactgtctgcctactgtacttacaaagtatgggtcatattttcttgtttcttttcacgccttgtaaatttctgttggtaactggacattttaggtaatacatcatggcaactctgggtaaacccacccctgctctaagcttgttattatttgttttttgtttaatgactagctggactattttagtgatgttcactgtcatcctcatctttgattctctgtaagtaatgagtatttttccctttttgcatataagtttgtcactgtatcactagatttcagtaaactgaatatgacacaaatatgactattttccacctgcagtgttaaatctttggtgctgctcctcaaggagttgtagctttgtgcatgtatgctcacatatggtcactagtatgacagtggttttggcaggactctttttgtcactttctctgaccacgtccaactgttaagctatactaagtgccagctgatttatgtactgctttcaacaatactgtggtgcttaaattgttctatagactaatccatcaaattcgggttcctttgaaggagtagttcctacattgtttgagatttgctctgttgaggagctctgaccacagatgggctcccacaagctgtctctttccaagggtctctgcttttccctccaggcaaaatctcaagtcaagtcaagttgagtcaaggctctggaactagggtggcagacaattgcacactctctctaaatgacaccctcactttaagagctgagtgctcattgggggccagagagggtagaagatgaacagtagcctccaacttttttggctagtttcatccagagtacaacactcactttacagactaaggcaaggacaatcagaacccctatatctcagcagtgccaaacccaaggtaaagactgcatctcatgagtggggagctgtgcagaagagaactctacttcagaacttagcctcatcaataggtagctgtggcaagatgagaaaagctgatatccttccataggattactctctgtctgggagctgagaatagagagagccttgtgttttgggctgcactagtttggaataaagtttccatctcactaagctgggaaaggggataggagggaaagggtctcagttccccatagagtcttgctgttcttaccacaatacagattttctggaataaacgtttcttcatctacttattatttaaatgtccgtaagactatttccagagacattaaatggtatgttgttgggtatttttgtttttgtttttgttttgtttcttttgtttgtttgcttgtttttgagatagagtttccctctttttgcctaggctggagtgcaatgttgttatctccgctcactgcaacctccacctcccaggctcaagtgattctcctgcctcagcctccctcccaaatagctgggattacaggaatgcaccaccacacctggctaattttgttttatgtttatttgtttgtttttgagaaaatgtctcactctgtcacccagactggagtgcagtggcacgatctcggctcaccgcaacctccgcctcccaggctcaagcgattctcctgcctcagccttccaagtagctgggattagaagcgcacgccaccacacccagataatttttgtatttttagtagagacggggtttcaccacgttggccaggcttgtctcaaactcctgacctcaaatgatccactcgcctctgcctcccaaagcgctgggattataggcgtgaaccaccgtgccgtgtgtgtgtgtgtgtgtgtgtgtgtgtgtgtgtgtgtgtgtgtgttttaattatcttcaccagtttttctggagaaagagtctgctgagcttctcatgctattatgccagaagtccctcccagtcaattaacaaaagtggcaaggtaattcaatgagaatactagagtctttttcaaaaaatggttctagacaatgaatatgggaaaaatgaaactcaacctttccttataccatatgcaaaataatttggaatgaattacagcctaaaatatgagtcaaactattaaacttctagaagaaaacacaggaagaattatttgtaattttgggataggcaaagatatcttagctaagacacaaaaaacatgaatcatacacacataaaaactgtaaaactgggcttcatcaaaaatttttaaagtttgtcctttaaaagatactgtttgaaaaattaaaaggcaagccaaagactacgagaataactttaaaaccagaaatctgatgaagaacttgtttttgagatatataaagaattcgttcaactgaataataatatagacaatccaatttaaaaatgggcaaaagtttgaacagatacttcatcaaagaagatatgaaaaatggcaggtaaataaatgatgttctataatattggtagtctttaaggaaatgcaaattaaaaacataggattgcactatttacctattaaaatggctaaaacttaaaagactgatgatatatatagcaagggtacagagcaactgtaatacttatacattactgattggaacttaatacggtacagccactttggaaagcagtttggcaatttctccaaaagttaaacacagacataacatacagtgcagtaatcccactcttacatgtttacccaagagaaataaaaacacaaagacttacatgcaaagattcataactttattaattacagccaaaatctggaaacaacccaaaagtctatcaacaggcaaatggaaaaacatgttgtagtatagccttacaataaaatactactcagcaacaaaaggaatgaaaatatcagtgaaagaagccaggcacaaaagactgtatgattctatttgtatgaaattctagaaaaaaaaattatagtgatagaaaacaaatgtgtggttgcctcagggtgggactgttgtgtggaaattggccaaaggggcatgagagatctttggaagaatgatgaaaatattttatatctttattatggttttagttacattactatacatttttcaaactcacccaaatgaatcctgaatgaattttattgtatgtaaattatatctctaatttttttaaaaaggtcaatagaagcaatgtattaaatagtttaatagtagagaaagatcagaaagatcaagacagagacactgtcttcatgtatattaacgtactggatatcagagattctgaaattatgttagatatcaagtgaaaatattcttttgtcaatcattttcattcagttataagaccaacatttatcttaagccagatttgtgaaaattcaatgtaaaaataattatcatactatttcacaagagtgttattgttccttgctcattaaaaaaaaaaagagcaagagcttgttgagatgtcatagctaacaaagctataataaactgggatttttttcagcaaatgtttgcttccctttcctctttgggtcagggtatactttccactcccactgcctttatgcttggccatgcgacttgccttggccaatggaatatgagcatgcaggatatctgcagaattttaaatgtgtttgcctggcttagcttgcacttgaactcctataatcaacatacaattacaacataggcaaccagtgcctcgttaggctggatcaaagcgtgaagcttaaggggcaaacctgaacttacctcaaagcctgaaactgaactacagcataaagcagagccacttatgagtgagaaaattaaaagcttgccatgatacgacaataaatttggtggaggtttgttacagcattattatggcaagagttgactcatgcaaagctaacatttgaggagaaattacaatgttctaggcactgagctacaaactttacatatattacccatttaattatcacaatgactctgtaagagaaaacattttacattgtctttctaaaatacatgatgaaactgaagcacaaataggataattgcattatccaaagtctcagagctagtaagtaaccaagtagggtttaaacccaggatgttataattctaatactcacccaatgcactaattatcaagatcaaattgaatttttaaattctattcttctagttggggtgttaaataatggttaacactcttcaatctccataaacccttttcttctcttccacctaacctgcccatcttcatacctgtatctaaacaaccatctgtttactgtaccccaactattgggttgtcagtagctagaaaagtacgctgccttgactccattacaaggttagctgatggactttccatatagctttgcaaaattgtgcttattcatgttgattccattttgcattccccacaatagctgttccaaaccttaatcaccaagataagccctaatttcaatatcactcctcactctcagaggctctgcctccaatttctcagcgaatgaatattccatgaggcattacatttctcaacttttttcctctctgccttatacctatctttacctctctttactccttgctcttgtgtctcaaatgactaattctacccccatattcttgtctttcttccttcccataccttgttctacagatttaacatcttcctttttttctctctactagaaaacctacatactcatttctcccacatctttttttgctcttgttgcccaggctggagtgcaatggcatgatctcagctcactgcaatctccacctcccgggttcaagcaactctcctgcctcagcacccccgagtagctgggattacaggcatgcgccaccacgcatggctaatttttgtatttttagtagaaatggggtttcatcatgttggtcaggctggtctcaaacacctgatctcaggtgatccgcccgcctcagcctcccaaagtgctgggattacaagcatgagccaccatgcccagccctatttctcccacatcttaagccaactttcccacaaacctgatgcctccacaaaccaccaactcatctttctccctgctttcactgttaaacttcttgacaaagtaggtgctgtatcagctatctttactttttcacctccaagtcactccttaatacattacaggataagttccccttctgtgaactttaccaaaattattctctcaaaggacactgacagtttccaaattgcccaagtcagtgatctcctctcagttatcatcttaaccaagcctttctctagttttaaatgacactgttgactacatacatcaactccatccctccagacccaccctgcacctcattgttcctccttctatgttctctattatggttactggtaccattcagtcacccagcctagaagtcttaaggtcaatctagtctttttctctctcacatcatagcctcttaacatctccaatattatttttattactattttgctcttataatctctcagttggactattcaaaaagtcttctaagatggaagttgatagcaataaacacctacatcaagaaacgtagaaagatttcaaataatcagtctaatgatgcacctaaaggaattagaaaagcaagaataagccaaatcccaaagttagcagaaggaaagaagtaataaaaatcagagcagaaataaatgaaatagagaccacaaaaataaaaaagatcaacgaaatgaaaagttggcttttcaaaaagataaaattggtaaaccactagctagactaaccaagaaaaaaagagaagtccaaataaataaaatcagaaattaagaaatggaacatcacaaccaataccttagaaatacaaaatatcatcagagactattattaacagctatacataaacaaactggaaaacccagaggaagtggataaattcctggacatatacagcctaccaagaataaatcaggaagatacagaaaacctgaacagaccaataataagtaatgaaactgaatctgtaataaaaagcctcccaacaaggaaaggcttggaccagatggcttcactgccaaattctaccaaacatataaagaagaactagtactaattctcctcaaactattccaaaaaaataaagaggagggagttctccctaactcattctatgaggctagaattaccctgatactaaagccagacaaggacatataccaaaaaaaaaaaaaaaaagaatatccctgaaggacatagacacaagaatcttcaacaaaatactagcaaactgaatatcatagcacatcaaaaagataacacatacaccatgatctagttgcatttatcccaggttgcaaggatgtttcaacatatgcatatgaataaacataatatatcacatcaacagaatgaaggacaaaaatgatatgatcattgatagatacagaaaaagcatttgataaaattcaacaatgcttcatgataaaaattctcaacaagctagcatagaaggtagatatctcagcataataaaggccatatatgataaacccacagctaacatcatactgatggggaaagcatttcctctaagaactagaacaagacaaagatttccactttcaacactctatgcaacatagtactggaagtcctagccagagcaatcgggcaagagaatgaaagaaaaggcgtccaaactggaaaagaagtaaaattgtccctctttgcagacaatttgatcttatatttagaaaaatcaaaagaaaccaccacaaaaaaaaactcttcaaactgataaattcagtaaagttgcaggacgcaaaatcagcacacaaaaatcaccagtatttttatacaccaaaaatgacatagctgaaaaagaaaccaagaaggcaatcttatttacagtagctacaaaccaaataactaaaaataaatttaaccaaggaggtgaaagacatctagaaggaaaactacaaaacactgataaaagaaactgaagagggcataaacaaagagaaagacatcccatgttcacagatcagaggaattttatggcaaagaattcaaaagcacagacaacaaaaacaaaaatagacaaatggaattacattaaactaaaaagcttctgcacagcaaaggaaacaatcaacagagtggagagacaacctattgaatgaaagaaagtatttgcaaactattcatccaacaagggactaatatccagcatataaggaactcaaatgattcaacaataaaaaatctaataatcccattaaaaataggcaaaggaaatgaatagacacttctcacaagaagacatacaaatggccaccagggatatggaaaatgtcaacatcactaatcatcagggaaatgtatattaaaaccacaatgagatatcatcttaccccagttagaatgactattattaaaaagacaacagatgctggtgagaatgcagagaaagggaacttttatatgctgttgataaaaatgtaaattagtacagctgctatggaaaacagtatggagatttttcaaaaaactaaaaatagaactaccatgagattcagcaatcacactgctggttatttatcatcaaaggaaggaaaatcagtatatcaaagggatacctgcaccttcgtgtttattacagcactattcacaacagcaaagacatggaatcaacttaagtgcccatcaacggatgaatggataaagaaaatgtggtatatatacacagtgaaatacttgttgtccataaacaatgagatcctgtcatttgcagtaacatggatggaactagaaatccttatgttaagtgaaataagctagacatacaaagacaaacataatatcacattttctcactcatatgtaggaggtaggaaatgcaaacttaatcaagtaatggctttcctctccttcccacttcttttccccatgcttaaaacccttcagtgggtattccataattatccattgcctagaggataaggacaaaatgtattattgggaataaaaggtgttttttggccacctctacagcatcaactcctgatcacctccccataccatgtcttttgcatccttgaaatttttccaccttgttcccttcaacatcactttttcctatttcccccctacctgtataatacctttcagtttctttctcaagttcttagatcctcgggtctttgttttttcttctcttttagttctagcaattcaattgccctgggcaatcttgtcccttctgatcaacctcattgtgtccaattaccaactattcatcaatagtttattaattttaatctacagcctccaacttctatcctaagccatagtcccatagacattctagtattgtcaataattacagctcatttattgaaaaactgctacatgccagcaattgcattagatgtgtgctagaacacatatctattaaataaacatgttctcatttaatcattacagaatgctgtaaagcaggcacaactgttccttctttgggatgaacacagacatggaatttatataatgttcccagtatcatataggtagaaagtactgaagcaggaatttaagctcagattggcaaaagaccatttcactaagatattcactactttttaccaaactccttcaaatgcacatattcttcagtacttattttattatttccaaacccaaatcactcctccatctgttattcccacattcactcatagcattactattaccaggaacaatacagaagtcttccaagtcacatttaactcctccatctaacttctccatatttgttgggtcactaagccacattctatgtctgaaaaagctcttgaatctccctctttttattgtagtatttcagtagctgtctcacagttctccagtttctgcccctgtaattatcttccatttctttgagagtttgctttctaaataaatctgactgacttctagataagatgactgaatatgcacaattctcttctctacttcctaatattccaattaaaatgatcagtgaaaccattaaaaactagagtaaccagtactacaaagaataacattctcacatcacagaattgaagaacttttgtaagtttaggccaacagaactttattgaaggaaggattggcccaaaccaagactcactagttaagaagtaacttgtctggaaagtaaataaagaaaaccaacagaatcccacaaatatgctcacatttggagatgtgaggctggaggtgaaagcagactgtgaagcaagtaggtgattccatattatattgtggcttagagttcaggtggacatttgataccaactcactgtgtcctttaagctgtaagggcatatactaatactaagtactctgtggaatattaagtcctctagtggaaggccatcttccactagacttaggcaaaggttaggaattacttccctcactccattcagggagggtattcacatacactatcatctttctccaaaatctctcccctaatctcccatctcctaactttcacaacctccatgtctttaagggatgcaaatgctgtctgactaattctaccctaactttataaattctaaaccactgtggccttcaaccccactttgaagtatggcatctagtatcttggggcttcaaaagaaacttccattttaatatccttttacattaatactctggataatgtttctatctgtgatttgatggggagggttttttttggggggggcggggccaaaaaaaaagtactcaaagctaaaaaaaaactccatccaagatcctttgtctttaaataccatttgaagttagactagtggattcaaatcctgactccagggactaactgtataagctttgggaacaatctaagcatcttaagtttcagttttataatcatatatgaataatgacaggccttcgtagaattttgtaaaaattaaataacatgttctaaacaaaactaaaaatatttctagcggcccataatgtcccagatgaaaactgccccttccacgtctctttgaccatgtcatctccatgtcatctctatgtcatctccgcctcactcatgccaatcactgttccacctcaagcgttctgctgccacttcttttttctccccctggaatattcattcctcagatagttgatggctaactgttccacctgcttcaggtctttgctcaaacacaaccttctccatccttctctgagcattccatgtaagcctaagccccttgttttacttctgcccttccctctatcccttccctgccttgatttgctccatagcacttatcatctttatcatactacatattttcacatttttactttaccttctgtctcctcccacttaatgtgggatccactaagaacattacctggcacataagaactagtcggtagccaggaacagtggctcacacctgcaatccagcacttttggagacagaggcaagagaatcacttgagcccaagtgttcaagaccagcctgggtaacacagtgagaccccatctctacgaaaaaagaaattaattagctggccatggtggcacacacttacaattccagctacttgggaagctgagggggaggatcacttgagcccaggaagttgaaactagagtgatccatgatcacacaactgtactccagcctggttaacagagggagaccgtgtctcaaaaacaaaaacaaaaacaaaaaacaaaaaacaaaaaaactagtcaataaatacaggctactgttgtaataataaatattataatgcagcacctctgtgaaatattccaggaatcagacctgactgcagcattgttcctggcttacacacagcatgtcaggcaaaagtgtatgtcagacaagaaaaaggatctgctcatatgaaagcatagggtaaaatcacaaggatcaatgagggtaagttaaatagtatcccataacatcaagttaaattaaaaattaggagaaatggggccagcaagatggccaaataggaacagctccagtctgcagctcccagtgagatcaatgcagaaggcgggtgatttctgcatttccaacccaggtacctggcttatctcactggaaatggttagacagagggtgcagcccatggagggcaagctgaagctgggtggggcatcccctcacccgggaagtgcaaggggttgggaaattccttcccctagccaagagaagccgtgagggactatgccatgaggaacagtgcactccggcccagatactacacttttcccactgtttttacaacccacagaccaggagattccctctagtgcctatgccaccagggccctgggtttcaagcacaaaagtaggtggcaatttgggcagacacctaactaggtcaggagatcgagaccaatctggcaaaatggtgaaatgccatttctactgaaaatacaaaaattagctgggtgtggtggcgcgtacatgtaatcccagctactcgggaggctgaggcaggagaatcacttgaaccaggcagtctgaggttgcagtgagccaagatcacaccacagcactccagcctggcaacagagctaggctccgtcaaacacacacacacacacacacacacacacacacacacacatcaggaaacaacagatgctggagaggatatggagaaataggaaagctttacactgttgatgggagttcgaccattgtggaagacagtgtggcaattcctcaaggatctagaactagaaataccatttgacccagcaatcccattactgggtatatacccaaaggattataaatcatgctactataaagacacattcacatgtatgtttactgcagcattattcacaatagcaaagacttggaaccaacccaaatgcccatcaatgataggctggataaagaaaatgtggcacatatataccatggaatactatgcggccataaaaaaggatgagttcatgtcctttgcagcgacatggatgaagctggaaaccatcattctcagcaaactaacacaggaacagaaaaccaaacaccgcatgttctcactcataagtggaagttgaacaatgagaacatatggacacagggaggggaacatcacacactggggcctgtcgaggtggggggcaaggggagggatagcattaggagaaatacctaatgtagatgagagattgatgggtgcagcaaactaccatgacacaggtatacccatgtaacaaacctgcacattctgcacgtttcccagaacttaaagtataatgaaaataaataaataaataaagctaaatttaaaaaaaagaataagatcatgtcctttgcagggatatggatggacctagaggccattatccttagcaaagtaacacaggaagagaaaaccaaataccatatgttctcacttataagtgggaactaagtgatgagaacacatggacacatacagcggaacaatacacactggagcctattggagggtggaaggtggtaggaaggagaggatcaggaaaaaaaaaactaatgggtactaagcttaatacctcggtgataaaataatatgtacaaacccccatgacataagtttagctatgtaacaaacctgcacatgtacccctgaacttaaaagaaaaaaaaaaacagtggaggcaattgcaaagacaataaatgatgtatttgattacattaaaaattgaaatatcaaaacattcccagaaaaattaaaaagaaagaaaaccaaagcagagtattcacacacaaaaaatataattttttaaaaaatctagattttataatttgacttaagaaacaacataacaaagactggtatggaagatgcaaaatttttaaatctaagtatgtcactgtttattaaagtagtaaaaataagagtaagtgaaatatacattaaaatgcacactagaatttggctgggtgcagtgaatcacgcctgtaatcccagcactttgggaggccaaggcaggcagatcatgaggtcaggagttcgagaccagcctgaccaacacggtgaaaccccgtctctactaaaaatacaaaaaaaaaattagccaggcgtggtggtgcacaactgtaatcccagctactcaggaggctgaggcaggagaatctcttgaacccgggaggcagaggttgcagtgagccaagatcgcaccactgccatccagcctgggtgacagagggagactctgtctcaaaaaaaaaaaaaaaaaaaatgcacactagaatttaagtttttattctctggttgcttttatttcaattactaatgttagaagctattttttagcaaatcctcacaactttgtacttttccaggcaatggccatcaatatcttcctttctctaaactggccaagaaatcttgataacaaattattttgacctcatgatattatatcagctacctctaagtgctttctctagtttatagcctagcaggcagaaactctgccttaattattcacatagtatctgatttaagtaacctattatatgcatatacttaattataataaattgtatcagggtctctcaacaaaatgaacttctattattgtaagcctacagatatagggaaagacttttgtctcaagcacgacaaaatctagaggttcacctaaaatagagattaaagaaaaagacctttcagttcctatggctattgtttcattaattttagcatacatgtaatttaccaataatctaatgtagtctattttttaaatgatttttaagtataactttgtctccattatgaatatatttttacaagttacttctaaaactaagtctatttctaaaaccacattttggaatggcaagtcatcttttctctcagaatgaaatctacaacataacgttaatcttttaaggatagagaggaagagaggattaataaagcaaatcttattccagtacaaataggaatctgtatgtggctggagaggtacctttatgctgaataattttcaagttatatgtaactttattctgcggttttctattcctgtgggactgtgagagcaggtgaaatatttgtcaccaaccataaaaaattatgaactaaagtaataacactacaataactaagctcgtctctaacagatgtattctgtggaaatttcccaagacaacagccttagaaaatggagtagtgttaatttcaactaaagttctccatattgaactatgtcttacaggtctaaagttctgatgcatctttaaataatgggttttgaaaaaagcttcatacatcttgataactttctcggctttaattgtgttgattctaacaatcctaatgagaaaaattaatgcctaaagccaatggtgataccagaaagatattaaaatacagctggcactctttatccatgggttccacgtctgcagacaagaagggtcaactaaggaacttgagcatccatggatttcagtatcctttgggttcctgcaaccaaccccctgcagatactgaaagatgactatatctggaacatacagattaaatgagatattgggaataacaaaagagggagaaatgaaggggaaaggtttcaagtgaattaattcttacttaaaaaattcatactaatagattaatttctcctttttgagagtcaatcacatgataagtcaatgtaatatttttcaatatacactaaatagtatagaatttggtgaggcacaaattccctgaactggatcaacagaagtttcttatttaaagtacaagaccatcattaaaagtttcacttacaactgtaaaccccaagaaagaacagatgctctgaagcattcttcacactgtccttaagtccctatgtccacctcttcctctgcattcagattaacttctgaaggaaatcctgaaatcaagcaaatataacactacagctacaggcattctttttttactctgcttagttcctctttcttcagtactaaaattaaagctatacaactgccttagcagcctgaataaatgttctatctttgaaggattagaaacctgcaaatggaaaaggcgttacaaacaaaacagtaacttaaaaagatacttcaggccaggtgcggtggctcatgcctgtaatcccagcactttgggaggctgaggcaggcagatcacctgaggtcagaagtttgagactagcctgactaacatggtgaaaccctgtctctattaaaaatacaaaaattagctgggcgtggtggcacatgcctgtaatcccagctactcaggaggctgaggcaggagaattgcttgaacccgggagatggaggttgcagtgagccaagattgcgccactgcactccagcctaggtgacagagtgagactctgtctcaaaaaaaaaaaaaaaaaaaaaaaaaatcagtagtatctttaggagcccaagaagccatcctaacgaaaaaaacacaaatgcttattaaggggatcctgatgaaaagactcaggatgttcaaagtcttaaatttgttttaaaaaccttcaaagtataaatagctattctaatatctaattcaataaacaaagagaataaggaaacataacataactgatcactgtaattgtgcataagtgcacatgcataaagaaccaatgattaaagacagaagtaacagtgatgttaagaaacattgatgttgcaacataacaaactaatgagaagcataagaacagtaaacattgggcaaatttgtctcaagctcatcttcatcagatttcagcttacagtatcctatctactcggaagtccttaatagtatataaaaatatctctaagcacttcaaaaaacaacattaagaagagcaaaatatggtggttttattcatgtggcttctcatttattgaaaattcagggtctccatgcttgcaatttgcaaacaactacaaacagcagcctcaattttctatcttatcacttgggaaaaagcactaaaatcatttttaatggtttattttgtaagcacaaattgtaagcatcagattgtgaaagtatcttgatgctataaacaaacagtaaaattacaatttacaatttaattaagaaaacaaaaaatataacctgtcattttattatttttaaaaatctaattgatttaaattaaatgccatgtttcatttgtcatataagaaaatataaattcacctttcatattaataattatacttcaattatattttatgatacaatatttaactactgatctaaaatatatattttcttatttttaaaatacattccataaataaaagacaatgattttctaaatatttaatggtgttcaaaaaaacagaaagaaccacattaataggagttcatgagccatatacggttggaaaaatatgctcttagataagcctgattattcccactctaccagtaataacaaaaagactcagttatgtaagtaatttgtgtccaagtttacataactggtgagcagcaacactagggtttaaaccagggccgtgtaactctcagcttattctatgaaatcatgatatcaatgaacaaatgaatgaattttatttccccaaggtttctgaataagaagctatttccacacactgttaggtggcttcattgtgccatcaataataacacagatacaattaaggaaataattcagtgtaacaaatattttctctagtccctatccaagtgtttagtactcaaaaatgaaatgctcatgtattagcaatctggctatcaaccaattcaaattaaaattccatttaccaatgtcatcaattacttcctaatgtcaactcttttgcagttttcattgcttgtggcctcagcagtcagtcattttccctcaaatattctcatttagttcctgttatgttacattaccctgaattttttctacctcttcattcccttgcttctatacaatcattgtaatgacataagtacaaatattaacaaaagtatatcagtgcaacaaaaaatatgacagagtaagtaacattaactaggacagagagaggtataaacttctagatcccaaaattctcactaagggatggatggctgtaaatgactgtattggaaagtcacatcagttcagacctcaggaggcagtattgtcccatctgggcatagtcttacatacagaagcaatccagcctgcatctgagacaggtgtatttttttctaacttcaagttgtataacatgtaacatgactgcaagagtactatacataacacattcaagcagttttttaaatccttaatcctcaccctcagactctctctagtctgataaagcctagtccctataaattactaaattcagtgtcatggaactggaactacaaatccctgggagtcatgctatataatctattctaatttctttcatataccccatattccctatattcttcacactcccaaaaatgggacccttcaaaggctcaggtctgaacccctttctcctccttcaatatatcaagcttatacctttgtgtttataattccacaatcaaatctcttgccctaaaagctttcccaagctcctttttcaaacctccccctgctaggcatcaccaccttggaattttgcagtcacctcaaggttaacatgtttgaaactaaacttatcctctttctaacacagccagtttcccttcttgttttctgagttgcagaagagagtgatccctggtttcctctcttctccctctctcctgcaacctatagccaccaagtcttgtaaattcagccttcataagtttccttcctgaccaccccaatcctcatctcagccctttttcccagagaaatgcaactgtttcctaactgatttctacacaaactgtctcttcctctccctctgctcaaactatatttcacacttcacttcctgttaaaaaatctttaatggatccccattgcctataaaatatctttcatactatttatccaattatttaaaattcttgttggatccctgtctctataacctcttctctctcttctcctatacatcagtcatccaatccagtcaaattgctccaaataaaacatgcagtcccacttacgtgatgttggttggaaatttctcacgcctagaatgctctcctttctctcctacacttaactaagccctacctttcaaaattggattgctatctcaaatctctcttattaaacacatgtgaaaaatgaaccattttctcataatccttgccaaaaaacaacatctaaactcctaaagaatccatccaaaagaaacacatgagtacacctaaaatctgaaagtcaggagaagaagaataatgtatgaatgcaaatttctttttccttctatattgaagcacttttggcctcatgtgttcactttctattcttaaaggtagagacttaattctattttctacagctcttaaaggctgataatgcagttattatgattgcgactagctagctcatcttgttagagaaagtatcatggtactgggttaagtttaaatatccatatggaatagaaaacttcatttatttgggtgccacaaattgcaaccctgacccttcccagaagtctattaatatctaccatgaacaccaagataatgtttgtggccagatgaaagtaaaaacagcctaaagtgaacacccaactgattttatttccttaaaatggatttgaaatagaatattttattattagttactttgaatattattgatatttacaaaaacatacttcaagtaaatctgcctaaaattggcttgagaactatctgaagagatttttttttttagattttcagaaaaatattcctcatggaatatctttccaattttgcagcataaaaaaatagaaaacattattttgtttcttatcaaactaatttttcaattttcattcatttaacaaataatactgagtatatacttatgccagaatttttctagacaccagtaatacagcaataaactaagtagataaagctgctgctctcaagtttacattctagtggaaggagatagaaaataaacaagcaaatatataatacgttgaatcgtggtaagttctctgaagaaagataaaacagggtaatggaaatagagaacactaagaaggaaaacagagaagactttattgacaaggtgatatctggacagatattttaaggattatagctattcataaaatatggaataccagcatagccaaaattcaggtaatactgtgatgtagtaacctaatgtttcctagttacattacttaaatattctgtcctactgaattaacaaatcctgggagtaaaatatttgtaaaagcctaggctgcaaccaccctcaatcatctgatatagacactatagttttctaagctccctccatcagcaaaatattcgttactcaaagctgatttgtactgaccctgtgggacacaagcccatttcaaggctgctggctatagcttgaaaagaaccactgagatgtaactgaacatttctgttcaagtagggctggccctacccctacctcctataagctttgacctggatacataatccggggctaattaatcaatacatccatctctttgacaactgagattggctcagcagtcaaaatgtgatcaaacttagaaatcttgcttgaatttggggaaagaagcgcttttggccaggattattaagcaaagaacacaatgaaccttgggctacttatatcccttgccaccatatgggaaaagctggcctgagaacaaaaccagtgtagaggaaaatccagctgaccaatggggaaaggcagattccagattacattgtttgagtactaggatccataaaagcctagatttttcatttatatgcgctaacacattccttttctgcataaatcagtttgaattggttttgaagagatacatggaaaatcagaaaataagatatggcagaaattttctcttcccattttcaacactgaactggtatattctaaatatggatatatgggtgttacctctttgatggaagtaaacaaggttttatcaccggacctaaagtctgaacacaaggccatttcaaaggaataaaatctaattttccttaagggagtcaatataaacaaaagaaggtccagggctatattggtgaccatcagaagctagtgcttcagaaagagtgtctcagggtttaaagattctggcatatgaaaaatattactttgagggaaaatccagtacacaaaataaaaggaattctaaagcaaatcaaatgaaagcaaatatagttcactgtcagaaaagataaagaaaaaaacgaaaaatagtacaaccagatatatagttgtataatccaagttttagctaggattcttaaaagtaattgctgacttgtccaccagacagtacaaataatcaataacattctatctcacagttgaattttgtaatcacaaaaagaacaagatctcaaattctctctcaagcatattagaattactgattttatttctttaaatatgtaaatttgtgagtgaggcacttataatttataactttttatgtgagtgaatgcatcaaaaattatgtgtaagtgttcaagataaccactctaaacagaagtaaaagacccgctatatatataataagcaaatgcttagaggtcactataatattcctaggaaaaaagtaaaacttgaaattgcattgcataaaggtctaattgttgctatataaacatatttcacaattttacctaggaagattttaattaataaattcatgtttatactactacctataactataggaaaagcttgtataaatgagaactacaaaaatcaacatgtatatggagaaaaattatttaaattataaaagatattgtatagccaattctacttagctttttaacaaacctgttttctctacttcttgggcacttagctaaaccatatttcctagtcttgcagtttgggacagccatgtgattgtatgactgagtactagtcagtggaagataagtggaaatgatgtctactgtttccaggcccatcccctttaacctcctacctcacctgtatcttccatcatctttacccataccaccttttgacagataagccaagtgaccttgaaaggttgtgctcaaaagggcagagtcaatagatgggagaaatctgaactccccctttgaggagagccacctgctgatccagaatacctgttttagactttaaattgttaagaaataaacttccattatatttgattcattatataatttttattttttaaaatagctagtattaccttaactaatatagcttatgattatatcactaatatgtgatcattgatattcatgattcattttatttttccactaattttaagtttttaatatccctagaactcagtacaaatgcattaacttcaaattataaaatattttaatattcataagtagtctacatcttcagtaaaactattttttgaaatttatttctttgcttaatcccagattctaaactttctttaacatttaattaacataattaaacttattcatggctttagtaatcaattagatctttctttaaaaagatttaattggccaaaagatttaattgtaattcttttttgaaatcaggataatgtaacctcttattaaaataaacaaaaaataaataaaaatcagtatgatacatcagttttgccatattcctataaagcatctcgaaagtaacaaaatgcttcaagaaaactaccataaaataacattaaaatatttaaaagaagaatggtcccgccagcatagctcttattcagtaagaatgaatgtgcagtccttctgaagaaacagatgaaaacaaaaaagaactaccccaggcaagactgaactaaaaatttttctcaatttccagtcaaactgtgttcacttttctaacatctacccatccacccacccattcattcttcttttgttcattgattcaaaaattgcatattggtattatgtggcaggccccataccaggattctgtgatatcacaaagatgaaatatatagataatgccctcaaggggttcacagtctaatatattcaagaacaagaaacaatcagaatttataactacttactacaattacaaccaccataagtactattacaggacattgggactctatattataaaaggcactgggagaaagcctaatacaaattggaatgaaggttcaaaaatgagctaagattagaagtaatgttttgatggaggaggaaaagtaaaaataatgaaattggtttggggcagaggagagtgtgagaactcaggtatagttatacatgctgaaagactggtgaaagagagtttggtaaatttatagaattataaataatggggaaaatgatgagagatgacaacacagccctaaataggagcaagttcatgacatgccttcattttccctattccataatcagatgattgttattatcacactttttcctgtgcctttcacctcatattcaaacaggacagaatcacttttcattttcactgattaaaatatagctatttctttttttaacacacttttataagagagctactatctgtcaggcaacatcccagactctcagatatactgttcttcctaactttctacaacaccttatactatcatttactggactgcttgcttggtaatacactttaccaccctgtatttcaattatttggtaatatatctgttttacctgccaaactccaagctccataaaacatggaaatgcctcagtcgttttttttgtctgccataaaacagtagctagtacgtaatataggtataacgaatgtttactgagtggatgaactaaagcaatgaagaaaaatggattagctttaaaataagagactatcattttagttttctcattacgcaataagattttttaaatatacaaaatatcataatgtgtattttatgtttatatttttatgttttgtaggatattgatactatttattggtaagtaataatattttattattgcagtaccccttcacaatatacccttatatatacaacttataattctgatagtttctgaaaacacattactattggaatgctgctaaaaatatgactagaattcattttttcatccatataaaaatgtttattgagtagttactatttgtaggacactatgtgaattgcttagcttttatatttcattgccattaaatacaataatgtaagaggtaaaatatgtcaaattaacttccctttgtacttagtcatagtcataccctgaggcaaaggaacaatgtcattcaacctcctttcataaataatatactttgaaacaatgactgattcattgttaaactgcatgattatatagtataaagattataaattcagttgaagttcaggtgttttttattatgagatactgtacttttaaattctggaatttccaattaatgtttttaatagatctcatttctcttctgagagtctccatctgttcaaagaaaaagaaaaagtctgagctggagtaagtaaggaggtttctatataaagaaagacttgaactacacctcataagatgaacaagatttaaacaaacagcaaagatgagagaatgaaacaatgagcaaacacaccatgcaagaaatgcctatgatatttttagacaaataacaaaggaataagctatactggtggcaggaaggagaacagaaagaaatatcattggataaggaggggtagtaacagaatcggaagatcttgacattcttgaactccaagaagaggaaggggccacgataatttagttaaaataaggctcaatattgtatcactgctctgtatacttcaatgtgtttttgtagtggctggtaacagtctttccttttcatatttagtgcttccttcagaagctcttgtaaggcaggtctggtggtaacaaactccctcagcatttgcttgtctgaaaaggatcttatttctcttttgcctatgaggacagagtcaaatctacacatatcaataccagccttaaatgtaaataagctaaataccacaattaaaagacacaaagtagggtgggcacggtggctcacacctgtaatactagcactttgggaggccaaggtgggtggatcacctgaggtcaggagttcgagatcaacctggccaacatagtgaaaccccatctcttctaaaaatacaaaaaatcagccgggcatggtgctgggcacctgtaatcccagcaactcaggaggttgaggcaggagaattgattgaacccaggaggcagaggttacagtgagccaagatcacaccattgcactccagcctgggcaacaagagcaaaactccatctcaaaaataaaataaaataaaataaaagacacaaagtggcaagctagataaagaaccaagatccattggtatgctgtttgcaagagactcatctcacatgtaatgacacacataggctcaaaataaagggacagagaaaaatctaccatgctaatggaaaacaaaccaaaaaaagcaagggttgctattcttatttcagacaaaacagactttaaactaacaaagatcaaaaaagacaaaagagggcattacataatcataaagggttcaattaagaagatctaactatcctaaatatatatgcacccaacacaggaggaagcagattcttaaatcaagttcttagagactttcaaaaagacttagacttccagagaataacagtgggaaactttaatactccactgacaatatgagaaagatcactgagacagtaaattaacaaaggtattcaggacctgaactcagcaatggatcacatgaacccagcagatatttacagaactctcccccagaatatacattcttctcattgccacatggcacatactctaaaattgatcacataatttaaagtaaaacacaccttggcaaatgcaaaagaactgaaaatcataacaaacagtctctcagaccacagtgcaattaaattggaaatcaagactaagaaattcactcaaagccatacaactacatgcaaactgaataacctgctcctgaatgacttttgtgtaaataatgaaattaaggcagcaatcaataagttatttggaattaatgagaacaaagatacaacataccagaatctctgggacacagctcaggcactgttaagaaggaaatttatagcactaaatgcccacgtcaaaaagttagaaagagctcaagttaacaacctaacatcacaactaaaagaactatacaaccaagagcaaacaaatcccaaagctagtagagtacaaaacataaccaaaatcagagctgaatttaaggagattgagacacgacaaaaaaaatccaaaagattaacaaatccaggagctgctttttaaaaaaaaaaattaataacatagaacaaatagctaagctaataaagaagaaaagagggaagattcaaataaacacaatcagaaataacaatggggatattaccccgaccccatagaaatgcaaacaaccatcaaagaatattatgaacacctctatgcacataaactagaaaatctagaagaaatgaataaattcctggacacatataccctcccaagactgaaccaggaagaaattgattctctgagcaaaccaaacctctgaaattgaagcaataataaacagcctaccaaccagaaaaagcccaggaccagaaagattcacgactaaattctaccagatgtacaaagaagaaccagtaccattcctactgaaactattccaaaaaattgaaaaggagggactcctccctaactcattctatgaggccaacatcatcctgataccaaaacctggcaaagataccacaaaaaaagaaaaattcacaccaatatccttcaggaaaatggatgcaaaaatcctcaaaaaaaaaaaaaaaaaaactgacaagctgaatctggcagcaaatgaaaaaccctatccaccataatcaagcaggctctatccctgagatccaaggctggttcaacatacacaagtcaataaatgtgattcatcacattaacagaactaaagacaaaaatcacataattatcacaatagatgcagaaaaggcttttgataaaattcaacatccattcatgttaaaaactctcaataaacagactttaaaccaacaaagatcaaagaagggcattacataatggtaaagggatcatacctcaaaataataaggacataccttataatgtccttattttgaggacatacctcaaaataataagagccatatatgacaaacccacagccaacatcatactgaacgagcaaaagctgggggtgttcccactgaaaactggaacaagacaaggaagccctctctcaccacttctattcaacatagtactgaaagtcctggccagggcaaccaggcaagagaaggaaataaagagcatttgaataggaagagaggaagtaaaaccatccctgtttgcagatgacatgatccatatctagaaaaccacatagtcttagcccaaaagcttcttaagctgataaacaacttcagcaaagtctcaagatacaaaaccaatgtgcaaaaataactagcattcctacaacaggcaagtggagagtcaaatcaggaacatactcccattcacaatagccacaaaaagaataaaattcctaggaatacagctaactagggaggtaaaagatttctacaagaactacaaaacactgcacaaagaaatcagagatgacacaaacaaaaataaattccatgctaatggataggaagaatcaatatcgtgaaaatggtcacactgcccaaatcaatttagattcaatactattcctattaaactaacattgagactcttcaagaactagaaaaaaactactttaaaatgaatatggaaccaaaaaagaaccaaaatatccaaggcaattctaagcaaaaagaacaaagctggaggcatcatgctacccaatttcaaactatactatggggctacagcaaccaaaacagcatagtactggtacagaaacagatacacagaccaatggaacagtatagagaattcagaaataagaccacacaccagaaataagaccacacacctacaactatgtgatctttgacaaacctgacaaaaaacaagcaatggggaaaggattccctattcaataaatggtgcttgaataactggctagcaatatgcagaaaactgaaactgtaccccttcctcataccatatacaaaaattaactcaagatggattaaagacttaaatgtaatacccaaaactataaaaaaaatcctggaagacaacctaagtaataccattcaggacacaggaatgggcaaagatttcatgacaaagatgccaaaagcaactacaacaaaagcaaaaattgacaaatgggatctaattaaactaaagacttctgcacagccaaagaaactatcaacagagtaaacagaaaacctacatattgggagaaaatttttggaaactatgcatccaacaaaggtctaatagccagcatctttaaggaacttaaacaaatttacaagaaaaaaacgaccacataaaaaagtgggcaaagaacattaacaggcacttcaaaagaagacatacatgcagccaacaagcatatgaaaaaaatgtgcaacatcactgatcattagagaaacacaaaccaaaaccacaatgagatgccatctcacccaaatggctattaaaatgtaaaaaacataacagacgctggcaaggttatggaaaaaaaagcaatgtttatacactgttggtgggagtgtaaattagttcaaccattatagaagacagtacggtgattcctcaaagatctaaagacagaaataccattcaacacagcaatcccattactgggtatatacccaatggaataaaaatcattctattataaagacgaatgcacacatatgttcattacagcactattcacaatagcaaagagatggaatcaacctaaatgcctatcagtgatggactgaataaagaatatgtggtgcatatatatatactggaatactatgccaccataaaaaagaatgagatcatgccctttccaggaacatggatgaatctgaggccattatctttagcaagctaatgcaggaacagaaaaccaaataccacatattctcacttgtaagtgggagctaagtgatgagaacacacagacaaatagagaacagcacacactggggtctactgaagggttgtgggtgggagaagggagagtattgggaaaaacaaccaatgggtactagactaatagctgagttatgaaataatctatacaacaaacccccatggcacaagtttatctatgtaacaaacctgcacatgtaaccctgaacttaaaatagacgtaaaaaaagtaaggctctcattgatttttgaccgtgaagtcatgaaatacaaactccatttcagaaagtctcatctggcagtataatataggtgtgggttagaattaagagagactgattgcaaagaaaggaacaaaaacattggtttgacaccttctgtgtgtccaacacactgctaaatactttttacacaaagtatacttcaataggaaacagtgagagactaagacaaaatgggaaggttagctataattatggggtaacctttcagtgatacagagaaaaatacatataaatgattcaacaaataaaatagaaatgacaggctaccattcgtttagtgtgtaatctgtggtgagcactgtgttaggtactccatacttatcacctctatcctcacaacaatcctgcaaggtactattattcttattgctaccatttttcatattaaaaaaatctaaacatcagggaaatatttaccagggaaataatacctgcaagatactattactattactattgttaccatttttcagatgagaaatctaaagatcagtgaaatatctacctatggagtagaactggaattcaaacacaagtcttttgaactcaaattcctgttctctaccctataatgtcacatacaatacaaaaatatgttattgaagaaattagtgtaattctttaatgcaaggactctttaatgtaagttagtgaggatgataattactatgacagtaaaaacactttaatgtttgagaaaggggcaccaggctaggtaaaactaggattagagattcaagggcaaaaggaaatctttcaaagctggaatggatttatttcagtaacaaagaatagattataggaaaagatataacatgtcaatttttgtctcatttattctgagggcaggcaattttcactttaatgatcccgcttctcactagttcattttctttgttcattttaaagtctttatttcctgtcggatttattcccttgactaagcattctttctccaaattaagactttgcttctcattattaatgatttgatagcacagactggcagctatcacctaaatggaactgttaggaaactgtaaacaaacacaacttttcagctttaaaaagcatagatggcagatgcaagaattctggcaaagccatgtgaaaataacatcagttttaaaaatctaagcctgagattgaagcaggccacactgtatcttttacttacgattattgattctgattctatcatagagaatcccaattcttcagctgttagaggctgaatgaattccaatattctttagttgtggcccaaatggtctcctgataaaatatgttgaagcatgagcaatttcagcaattttttctgggttactagtctactattccatcagaattaatttgctcttcaaggtgaaaagcatttcctcggacacagagttaagtgattattgcaactgccatgtctctttaagctcaggctctcgcctgatttcctttggcattaggcagcaaaatggatttttttaaatactggcaagctgtccaaggtcttcactcaaaaagagagccaagaactcccaaatgtaaaccttgaaatagaattacaaattaggtacactatgacaaatgaacaaggtaaatgtgaaaagtgactaaaagttaacttcatcattatccagaatgtgaggttaaaagaaaggtgaattattactacattttcaggaaaacattacaattagctcataagtgtaaagtacagattctcaggaaaattctaacagctgagttcttctactagaaagtttaattcaagttagagattataaagagattagaaagaacaaaagtatcaaaacaaaaactggccaataatatatctgaagagtatataaaaatggtaacctcacaaatgtcataaagttcaaaacataaaaattaaaatattttagaaaggaagtttactgcccttaatagaatgctcataatatagatgcatattttaacatcaaacacattttaagcacatgcacaatgaaatactgtgcatcagtgaagtccataaaaatgtgcaagaatcattaacaattagaaaaaaacaggatgtcatcaaccaccaaatatacattcttatcacctgcacagggaacatactcaaagattgatgacatgctcagccataaagcgagtctcaataaattcaaaaaaatcaaaaccataccaaccatatttttggaccacagtggaataaaaatagaaatcaatgccataaacatatctcaaaaccatccctcaaatcttttcaatttcatgaaaactaaacaacttgctactgaatgagttttgggtacgcaatgaaattaaggcagatatcaaaaaaatctttgaaataaactaaaacagacgtaacataccaaaatctctgagatgcagcagaagcaatgttaagaggaaagtctatagtgctaaatgcctacctcaaaaaatttttaaagatctcaaattaataatctaacatcacacccagaggaactagaaaaacaagaacaaatcagaagaaaagaaataaataaaataaaataaaatcagtgcagaagtgaatgaaattaagacccaaaaattcatacaaaaaaatctataaaaccaaaagttggcatgaaaggataaataagatcaataggctggcagctacattaacaaagaaagaagagacaatatccaaataagcacaatcagaaatggcaaaggtgacattaaaaccaatcccaccgaaatacaaaaaaaaccctcagagactatgatgaacaccatatatatacaaactagaaaatctagaggaagtagataaattcctggaaatacaccatatcccagggttaaatcaggaagacattgaaaccctgaatagaccaataatgaattccgaaatggaatcagtaataaaaagcctaacaaccaaaaaaaaaaaaaaaaaaccctggaccagaaggatttacagctgaattctaccagacatacaaagaagagctggtattaattctgctgaaactattccaaaaaattgaggagaatgaactcctccctaactcatgaagccgccatcatcctaatatcaaaacctggcaaagacacacacacacacacacaaaagaaaactacaggccaatatacctgatgaacagagaagcaaatatcctcagcaaacaaactaaaagcagtagtgcatcaaaaacttacgacgatgaaggaggctttctccctgggatacagggttgattaaacatatacaaaccaataaatgggatttaccacataagcagatttaaaagcaaaatcaatatgatcatctcaatagatgcaataaagataccttcaataaaatccaacatcccttcatgataaaaaccttcaacaaattaggcatcaaagaaacacaactcaaaataataaaagccatctatgacaaactcacagccaacattataataaatgggcaaaaactagaagcattttccttaaggactagaacaagacaagtatggctactctcaccactcatatataacatagtactgaaagtcctagctggagccatcatgcaagaggaataaataaaaggcatccaaatggaaaacaaaaattcaaactatctgtcttcactaatgatacgattctatgcctagaaaaccctaaactccaacaaaaagctgttgaaacttataaatgacttcagcacattttcagaacataaaatctatatatgaagatcattataatttctatacatcaataacattcaatctgagaaccacagtaagaatgcaatcccatttacaataaacacacaaaaaacgaaataccaaggaatacagctaaccagggaggtgaaagatctctacaatgagaactacaaaacccactgttcaaagaaatcagagatgatacaaagaaatggaaaaacatgccatgttcatgggctggaagaatcaatatcaataaaatgtccacactacccaaagcaatctacagattgaatgtattcttattaaagtaccaatatcatttttcacacaattagaaaaaaactattctaaaattcacatggaatcaaaaacaagctcgaatagccaaagtaatcctaaaagaatgaagccagaggcatcacatttcccaacttccaactatactatacagctacaataacaaatacttcatggtactggtacaaaaacagaaacatagaacaaaggaacagaatagagaactcagaaataaagccacacaactacaaccatctaatcttccacaaaaataaacaatggggaaaggacaagctattcaataaatagtgctgggatacctggctagccatacgcagaatgaaactggacccttacctttcatcatacacaacaattaagaaaagatagattaaagatttagatgtaagacctcaaactctaagaatcttagaatgaaacctagaaaacaccattctggacataggtctgggcaaagatttcatgataaagacttcaagagcaattgcaacaaaaacaaaaattgacttaaaaccttctgcacagaaaaagaaactataaacacagtaaacagacaacttacagaatggtagaaaatattcacaatccatgcatctgacaaaggtctaatatccagaatctataaggaacttaaaaagtcaacaagcaaaaaacaaccccattaaaaaatgggtaaaggacatgaaaagaagatatacatgcagttaataagtatgtgaaaaaaatcctcaacattactaatcattagagaagtgcaaatcaaaaccattgaatgcaatctcacacctgtcacaatgactattattaaaaagttaaaaaaaaaacagatgttggtgaggttgtgtagaaaagggatcgcttaaacactatttgtgggaatgtcagttaattcagctactatagaaatagtttggagacttctcaatgaacttaaaacagaactaccatttgacccagcaatcccattactgggtgtatgaccacaggaacacaaatcattctaccattaagacacatccacgtatgctcattgcagcacttttcacaacagcaaagacatggaatcaatctagatatccatcaacggtggactagataaagaaaacgtggcacatatacaccatgggatactatgcagccataaaaaagaataaaactgtgtcctttgcagcaacatggatgcaggtggaggccattatcctaagcaaattaacacaggaacagataaccaaataccacttgttcttactcgtaagtgtgagttaaacactgaatacacatggaaacacacatggacacaaagaggggaactacagacaatggggcttacttgcgggtgtagcacgggaggagagtaaggatcaaaaagctacatattgggtactatgctcattacctgggagaataaatcatttgtacaccaaatcccagtgacacacagtttacccatgtaacaaacctgcatatgtacctcactgaacctaaaataaaagctggaaaaaaaaaaacaaaatagccccatctcaataatacagaaagaataacaaggattaattcaaaaatgtttatcacataaatatttaggaattcaaaaattaataatgtaatcagacatatttcctatattcatatactatatacttccttcgtatatgttatcaggaattaaacatggtatttgtaatacaggatatccttctcatcagtgagagtgatgtactattacctaagaaaaatataatttgacttaagatcctagcgatatattgtgaagtcaataatatagtttacaggggtattttatttcatcctcaaagaaactggcgaggtattcattatttgaaaaatcacccaacaggggaagttcttctcagatcataaatattccatgttagaatttttctcatatgcctacaccgaaatacaggttatcaaacagatgtttttatgcccatgacctgttctatcaattcaataaatgtttgctaagcatgtgagtgaggaactatgctaaggacaaatacatgcacacacacagattaatattttccctgtcttcaaggagcttataggcaaagtcaaaaaagatgattcatgcataattaatacaaagcagcataatgatgcaaatagttagatctaaatagaaggatcaaaaatagttttcaataagtagagatggtagggataatatatatagacaaaacatgaacgtggacaataagaaagacagacgtgtttgagagtaatccattttatttatttatttagagacagagtttcactcttgtcatccaggctggagtgcagtggagctatcttggctcactgcaacctccacctcccgggttcaagtgattctcctgcctcagcctcctgagtagctgggatgacaggtgcacaccaccaggcccagctagtttttgtatttttagtaaagatggagtttcaccatgttggccaggctggtctctaactcccgacctcaggtgatcctccagtctcagcctcccaaagtgctgagattacaggcatgcaccaccgtgcctggccaagaataatccattttactaaaatatatttatctaagacattactagcagataaagctggaaaaatatgatgaagctagaaatgaagggtcttgaatgcctgagttaaacgtttctatttaacatttgcagtgaggaccagggctagttttgagtaggaaaatgacatgaccagaatggcacttaaggcatactgacttggcagcattgctcagaataaatatgagcagatgaagaggagagactagaagtgggtggacagggtaggaggctcttgaaataactcaggtgaggggaaatgatggtctgaacccacaaactggcaggaatgatgaaaaggtgagaggtcaatctggaagacagtaatgaaagacagaatgatctacttgtaagacattggacatacattcagatccaagatttaccttttgggcaactgactttactcctgattcccacgttgaggataataaaacctacctcatgggattgttgtcaggaataaaggagataatgatttttaacatgtttacacaatgcctagcatgtagtgaaaatttagtacttaataaatgctagcttctagtgttacaattattttgagatattatagtttggtcactgtttactgatttttttagtagctacatctcactgctggttcacgtagcagttgtagtcatctatataccctaaaacttttgtgtgaactactctctgacattaaatctcccccaccttgtatttataccattgatttttaaggaatctaaatataagattttatactaactcccactgaattctatgtttttaccttgagccaagatttcagcctattgagataatttttcatataagttcaattatttgtcatatttgctattcctccctaacttctacaaagctgattagaatacatatggctttttccaagtaaaatattgactcagaccaatccaagaacaaaatatttcactttcactagagaaatcccctctacgttgacattttgtgactatttagaacgtctggacaaaattggacaaagtctgtgaaacataaaaatcaagatctcttcagcaacataaaagagaacaaaatagctcttttctatggctgacagaaagccagagtaaaatttttttaaccgatgcagaaactaaggcttggaaatatcaagcaacttccaaaggtcaccctgctagtaaattgcagaacagagttgtacaaccaaatctgtaggactcacaatctcatgctcttaactgctagactaagttatctccctaagaaagatggttgagattcccatcatgattgctgggaaaaacctccactttggtctctggaattcatctccaaataattaaatgcattttgcaatgataatggttcatttgcaagaacatatacacttttatatgcagtctttgcctttttatgcatttattcagtcaatgaactttcactgagagaccactacattcaaggcaccgtgtgaggcaggatgtgactacagagatcaatctaataatgaacctactgtcaaaggggtatataagaagtaatgcaaaacatatacacctacaaggcaaggcagaaagagatgtatcaagaatggtaaaaagcaagtgtgctagaagttcagaaaaatgactcttttattctactagccattttctcaaggacttcctagattccctaaggttacaaaaagttcttcctgaggtgagggtaggaacaaaaacttacccttctgattctggatttttccattaatgtacctacagtacatacgtgtggttaatggtattgttttcaatatataaatgcaggtcaacatgatcctagttctacattccctaattcttgcaaaacctgttaggagatttccaaccttagttgaatcaccttgagtcaccacatccaaaaggtctgttcaactacataagaaatagattgttcaggttagaatgttcttttgaacattgtataccactgcttaagatttagcaccactataaaaaattatacatgctaaagaatcagttatgttcctataataagcctctatttacatttcaaaaaatttgcctcccaagattctctaaatctgatggaaattgggtaagatagccacgaagctctctccaaattctgaaattgatgcattcctgataataagctctagaaattgggttagaatgtgtttgaaggtaaactttgtttcagaaacaccatttggtttttaggcaatctaatctgactctactgatctttaaaacttgatgaattttagaactaaattaagtatattttccaaaagtagggacctcactcccagagagtattctcaagaatagcttggcattaaaaaaaactgaaaatccttcaaggtaaatcttgaaatcttaaaatactaaaataaaatacctcacacttcagaaggctgacatgtaattaaatattttgcattggaaaagaaagtaaaataacagaaaagaggcatagttgctgaacaaaattgcacaaaacctgccaatgcaacccctttcaaaccaaaagctttagatgctgcttgtgtcaagagaaaaaaatacataacacgtttcatcccttaagcttcttatttacttcttaaagacatacgctgatgaggtaatgttctattacaaatgtttaaaaaaaaaacaaaaaaacttttcctggtacctggattctgaaatctgctctaatgatctttatcatcaaatttctctatggcatgctgtgttcacatttaagaattgtatagattgtttatacacatggaggaaaaaacatgaatataaggcttgggaaaacataaagagaatagaaaattttttcagatgatttcacattctttcgaaaacctaaatttcatgagttggtaaagaatgttaggatatttatatttcttcaaaatttacattctagattatataatgtcctaattcaacttagaaaatggtttcagatgcatattataagagtatataaaacagactgacttttgaattaaaatgtatgcaagacaaaatgcaattttaacttgagctagcctttatattacatgcaaaacctccaattgaatacattcaatcataataagaatttaatttttaacttatattagtaaaagtgttcaaactaccatattatagctaatattttaatagaaacaaaaatctccgattcaaaaataaaagttcttacataagatggctggttttgtatttgaaattactgaatcagagtgccctctattggaagaaaagagacaacaaaagctaaactgaactaagaatataggtaaaatacttccaaaactcaagccacatcattaatatgtaaaacacattaattaaaaatatggatgctacaaaacatatttccttacatttttatttctccaaaataacttttggaattacttgtcatatcacaatcagcaagttggatgtttcatatcctatgaaattaaattttaactgaacccaaatgctcatcatttaaccagtaatataaataacagacatacagaaatgttttccacatttaatagtccaatataacatagaaatgttataattgaggactgtggtttgactgcagtttggattttccttgatgataaactgaaagcctccttgctatgaacctcatgtcggtgtccccgccaagtttatatgttgaaatcctaaaccccaatgtgatggtattaaggagggggtgttgggaggtcatcagatgataaccccttatgatgtgctagtgttcatataagaaaacatcaggagggctgggcgcagtggctcacacctgtaatcccagcactttgggaagccgaggcaggcagatcacaaggtcgggagatcgagaccatcgtggccaacatggtgaaaccccgtgtctactaaaatacaaaaaattagccaggtgtggtggcacgtgcctgtagtcccagctactcaggaggctgaggcaggggaatcgcttgaaccccggaggcggaggttgcagtgagccgagattgtaccactgcactccagcctgcgacagagcacgactccgtctcagaaaaaaaaaaaaaaaaaaaaaaacacatcaggagaacctgcttttttcccctctgttctttgccacatgaagatacaaccagaagacagccctctgcaaaccaggaagcaggccttcaccagctaccagctctgctggtaccttcatcttgggcttctcggactccagaactgtgagaaataaatgcttttttttttttccaagccacccaatctacgctaatttgttatagcacagataatccctaattcaagagacttttagaagctcttacactggggaattgcagaagtaggctggacattaagatttacgagatttgttccatctcaaaaaattctagttttgtggtgttttcaagacctcagttctgactcatcatctcagacctgaattacctcagaaagatcttggctgatttttggctccctagaccagtagtatggatgttagacctgagaagcttttccaagagcaatgctcagagctacccaaaattattttgatttagttggtctggactggtatctgagggcatcagtatttattttttagagcctctctaggtaaatctaatatacaactatggctgagaaccattgtttgagcctctccccagatcaagcaacatacaactaccacttttattttccaaaaatgtcactttcaggagaactctcctacacaagaatttattctcaggatcaattttaaacttctggctagcctcccaatctacttagctgcctttgttctctgacaatagagttgagtggcaaggggttatggctccagctccagaatgtctgtgttcttggctctgtaattaccgcatgaaactgggaaagtcataaaagctccctgtatggagaaataatactatccttttcaaagggttattgtgaggattaaatcagttaatacaagtaaagtgttccataaattgaggtattatcattacttacccaactttatttcctactactttccaaaacaaactctcatcataaatcattctcaaattatgcactaattctcatctctgtgcttttgcacttactgtttcttcaggctggaatcctttctcaatcatttgtcccaacaaaagtgaaaagcacagctcccctttcaccaggacacagcttagtctctccctacctccacaaagacttcaatgagtatctgtaaatattcactggtctctcccttttaaaaattcctttggccacaaggtagcatactatgagaaatgtggctgagaattaaaaacactggctcagagtttgaatcctcactctgccacttggcagctaagtcattttctaaatccatattgttaggattacttaataagcgacttaaatcacgtaaagcattagagtagcaaatagcaaaaactgagtaagtgtcagttcttatttattcagtgttttatatgttagccttcagttatagtctacacactgtgactgaagtctccttaggataggtgttttgaaacacttgaaatcaagaaccatatctattataaatcccacaactcaaaacatggtaagaaccatctgtattaggtgacctatattaggtgacctgtacttgactaaactttttgcaacatgtaagagtataattgaagcaatattctggaaaaaaaacttttttgatgaatagaaacaaatattcaacaaaacatggaatgaattcaaataaaacaggctacagaaaagggtcaaagtaatttgattactttttaaacattcgctaacaggtttctatcagattcatcttctgaaaggtcagttccaatgatgtcttttatctgcccaaaatcctttagatttttctcatttcttaaaaaaaaaaccaaaattcttagcctgacattcataattatccatgacctgacctcaaactacacttctactctctcatctttcccctttgtaaactctattcttccaaataaacagaattatttgctcttactcatatataccatctgcttttctccctccacataatctttaatattttatagggaaatattttcaaagaacactattgtaaaggtttgtcacaggaacgaagagtggtgttagaaaagcatgagttcagatttcaaaaccttaacgctcaatttatgagcattaatttctttcttgccactatcacaatacagtctttggcttacaaaaaaaattgaacatcttttccccaaactattatcactctctcaaagtcaaaagcctttgccgtaacttcctgaaagatagaagcttgaatcatggtctccaagcagcacatacagaccccagggcatataagatattcattgggtaaacgaaaaataattagagcttctgttttacacttattctctaccttcctcaatttgaatttcttttgttgtgtatgtctcataatttacatcaaatattactagaaatgcagtctatatatatataatttacaaataatcagggatatttgctcaaaatttgtttactaatggtacgtacaacaaaaaagtttggaaaccctggtctaaaaaattagggctttcagaatatctgtggttttacaagtagaaggccagaagctgccagtttacataaatctttgaggatggatctaaaaatataaacactatgtgttgtttatatagcacaaatatgttttaagttctaactaactttcaaggaaatattaaaatgtaactgattggtaacctggagacagcatacacctatttcagattttttaacagaggattttgtcccaacattaaagttactattataaattatttcattaatataaaaatttcatttggtaaaacttacaggtatttacttcagtacatatacaactgttcatagttattcataaagaatttttattggggccaataataggatgtttttacaaaagagagtgaagcacaaaaacaaaatgaaacaaaaaaagcaggccaaggaggtaggactagccatggaactagattagcaagtgctatcccaggaaacagtgtcacagcttactttaagtaactaaattaagtaaatgttctcataatggacagtcactatacttagcaagtttttttttagttttcacaaataatatgacatacttaacacagttcactctattactggcttttgaataaagtatgatatatctgtaacaaattaagttctaaaagtgactacagatttcttatcagaataatgtatttcctttaataccagtatatactataagtccttcctctacaggacaaaaagtaggtttaaatatcttaatattaaactgatttattctctatagtttttcttgcttttgtgttcatataaaaatccaaatgagtgagaatcacccatggcctgacctcaatctatccttctaatcttatctcccctctttcttctttgtaaactctcattcctaataaatagaaatacttgctcttactcaactatatcatctgtttttctgcctcacataacctttaatattttatatggcaatattttcaaagaacactatcataaaggcgttgtcacaggaactaactcatgcttaagattctgagcttatcaaagagaaacctcttgggatttgcataatattataaaaatatgcagactgaactttccacatttctctcctactatgacttcaggaggaagtgaggaaactatacgtgtggctctgctctgttagtctgagttcatagagaaaatggggaagacagtcgaaaggaaggtttttgtctttttttgggaaccaacatcattatgcccagtaaaactaaaggaacacaacaacaacaacaacaacaaataccaaaaatccatgtttttaagaaagagtctaaaagtagagagaccatgaagtgatctgtcaaagcactccttcccctacacatgcactgcgagtaaaaccccaaagaacgtcaggaaaagagcaataaggaaactgacatcttagagtggcggaatctgataatgcaccacatcccatacctcttaagtgtacacactgaactggcaaagacagacacattatcttcattcccccccgccttacttactacactctggcttccatttttcccaagttcttcctctgaaatcttgctcaaattatctaagtagtggtctgatattgtgtggcacaagtcttcaaacgaataatccttttcttgacagagttttatttcatccaagagttttgataattctccagtgacggtttcacctatgagaataattttttcagaagtttcaagaaaggctattgttaaaacttaatgttaagcaataaaaatatgactgctatggtgatagaactcaaaatataacaagattaagcagtcagacactattctgctgaaaacaaggtactcaaccataattagtacaacaatattaatgggcaaaagagattataattttgcctatttttattctttttcaaaatagaaataattattgtaaggttatgtatacatagtacataaaagcatctggaattacaattcccaaagcttcacttattataggatttaatttccataatatttcattggtattttacttcactgacagaattcattagcaaatttgaaacggtgctgagaaacttcttcctaggttcaataaacagaaatagtacaagttatttaaacaaataataacataggtaatcagtaccttaagaattatggtatatgatataaagtaaaaacacaaaagaaacaaacaatatgcatcatctgtcaaacatgaagattttgtagattacatgaaaatatgcacatttctaaacagtctcagaaagataccttatacctgtaatttattctgaaaaaaatgcccagcagttacaatccagattttaatatttttattctgacataaaaacatatttaacatcagctgactatagatgcatggatttatttctggactttattctgttttattggtatatatgtctgttttcatgcctgtaccatactgttttgattactgtagctcttcacaaggtttccaagaacacaaaatgtggaaaagatagtctcttcaataaatagtgttgggaaagtggatagccacatgcaaaagcatgaaatatgacccttatctcatcccctatgtaaaaatcaatgcaaacagtataaagactggaacattaagacctgaaaatatgaaactcctaaaagaaaacatagggaaaaaacttgatatttgtttggacaatgatttcttggatatgaacaaaagcaaaaatgaacacgcaggattggatcaaactaagaagcttctgcactgcaaataaaacaatcaacacactaaaaagataacttaaggaatgggagaaaatatttgcaaaccatagatctggtaaggggttaatgtgcaaaatacataaggaattcacataactcaatagcaaaaacacaaataacctaattttaaaatgggctaaggactcgaatagacatttcttcaaaaaaggcacataaatgacccaaggtatatgaaaaggtgctcaatatcactaataatcaggcaaatgtaaatgaaagccacaatggggtatcatctcccatctattagaatggctattctcaaaaagacaaaagataggaggtgtttctgaggatgtggagaaagggaaccctgtatgctgtccatgggaatgtaaaatgttaaaggctctatggaaaacagtatggagattcctcaaaaaattaaaaatagaattaccatatgattcagtaatcccaccttggggtgcttattcacaggaaatgaaaccagtatcttggagagatatctgcacccttctgttcattgcaacattcttcagaacagccaagacatgaaaacaactgaagtatacactgtcagatggatggataaataaaatgcaatgtgtgtatacatttatatacacactacacaaacaatggactattattcagccttaaaaaaggagatcctgccatttgtaacaacatggatgaacctagaggatattatcctaagtgagatgaaccaggtacagaaagacaaatactgcatgatctcacatgtggaatctaaaaaagtcaaagtcataaaacagagagtagaatggtgaatgccaggggctggggagtggaggagatgggaaagtgttgatcaaagggtacaaaggttcagttatgggggattaataaattctggagatttaaaatacagcatggtgactatagttaataatattctattgtatacctgaaacttgctaagagagttgatcttaagtgttctctccaaaataaaaaataaaaaatactatgtgagatgatggctatgttaattagcttgattttggcaattattccacaaagtatatatcaagttgcacactgtaaatatatacaatttttatttgccaagtatacctcaataaagctggggaaaaacacatttaagaaaaaaacacatttaagaaacatatactccagataaacttcattacagcagggatagttttctgctttgctcactactgtatctcagggctgagaagccctaatcagtaacaggagctcttataaatggatgaaatatagagtataggatataacctattagacttgaaattttcacaactgtacatacaagtctagtatagattccagggctttataattaggtactcacttttggtcttttgggaaggagactcaacaggagatgaaatgtgtgtttcttgtgttgcatcttcctgtacaggctcttcgaggactgtagatcttcccacgccttctaaatactctgtgtgtatacatttttgagattacatacttgaattcatttattttaaaatcaataaattttaagttttacttctggtaatcagtttttcatttattttttcatatcctaaatatatcctaagttttcaaaagaacttcaaaaaaccaaacatatcaaaagaacgccatgatgagctatttaattaaagttgtaattaaaaaaagacactggattatttgggagaaactcttgaacccctttcttctaaaacctaaacttaaaacattctttccttaaaaataaattcacctattgaagatacaataaactccttggtctccttattttccatctgaagattttaaactgtctgaaagatgctttgaatagatttaatccccaaaacaggaatgtcaaattcagatggataccacaaccagccaggtaacataaacgaatgaaatggaataagttcatttcaaaatggtgctgtaatcttgtaacataagcataatttgcatattaactttatttccacaaagaaataatgttcattgccattattcttgaagtaatgtcctatactcagcctatttttcatttttctagttttgatacagatataatattaggaatagcagcttaaacttaaatattgcttactatggacccagcattgttctaagtgttttgtataaattaactcatgtaatccttacaaaactatgacacatgcactaaattttaaagattacaagtaaaggaggagtattattaacttgtccatgttcattcagctaataggtggcaaagccaaataaatataagacaagaaaacatctcacttttctcttaaccataaagaaaacagcatctgaatgtagaaataaatgttaaccaatattcagcctcacagaccatgttgaaccagagaacaaatgaccaatctaaagttcatccctgaaataaaacttcttttagagaaaccaaaactccagagtttgagctaaaatcctagggttttttttgtttctttttggttgtttgtttgtttgagatggattctcgctctgtcgcccaggctggagtgcagtggtgcaatcttgactcactgcaacctccgcctcccaggttcaaataattctcctgcctcagccccccaagctagctgagactacagatatgtgccaccacacccggctcatttttttttgtatttttagtagagacagggtttcaccatgttcgccaggctggtctggaactcctgaccttgtaatccgcccacctcggcctcccaaagtgctgggattacaagcgtgagccaccgcaccctgccaaattctagatttttaaatgttaacagctaattcaatttttatggaaacacaatgtgggctcaaaatatgtgatatatacaaagcatgtgtgctatctgccaaagcgttcagcccacaagtggctagtttgtagcctctgtataaagattaaatgaacagatcccttttcatacagagcatttgcttatacttctttattcaagaacctttttcttaaaatctaataaagaaaatttgtattctcatgccaaacaagtatgtcctcataccattcaaataatttctaccagggaaatccaggaatgcaaagaacagagatgacgtgttcacattctgaaatttgccagtaattagagaacttcaaagatgtactgtatgccctaccacaaattaacatacctaattaatcttgaccatttaggagagcaaagatagttactcccatgtaacaacatttcatcttatataaaccaatgcagtatgtttttaaaaagtccatggttatgtcacaccccattttctagtgggtgacatttattttgcttttcccaaaagacatattacacacatgcttcagttttgtttttttgtttgtttgtttgttttgtttggtttgtttgagacggagtctcgctctgttgctcaggctggagtgcagtggcgcgatctcggctcactgcaacctctgccttctgggttcacgccattctcctgcctcagcctcccaagtagctgggactacaggcgcccaccaccgcgcccggctaagtttttgtatttttagtagagacggggtttcaccgtgttagccgggatggtctagatctcctgacctcgtgatccacccacctcagcctcccaaagtgctgggattacaggcatgagccatcgcgcctggcccatgcttcagtttttaaaagttcagtgagaggcagccgggcacggtagctcacgcctgtaatcccagcattttgggaggccaaggcgggtggcccacaaagtcaggagatcaagaccatcctggctaacatcgtgaaactccgtctctactaaaaataccaaagaaattagctgggcatggtggcgggtgcctgtagtcccagctactcgggaggctgaggcaggagaatggtgtgaaccggggaggcagagcttgcagtgagcccagagggcgccactgcactccagcctgggtgacagagtgagactccctctcaaaaagaaaaaaaaagttcagtgagaggctgggcgctgtggctcatgcgtgtaatcccagcactttaagaggccaaggtggctggatcacctgcgttcaggagttggagaccagactggccaacatggtaaaaccccctctctactaaaaatacaaaaagtagccagacatggcggcaagtgcctataatcccagctacttgggagactgaggcaggagaatcacttgaacccgggaggcggaggctgcagtgagccaagattgcaccactgcactccagcctaggcaataagagcaaaactctttctcaaaaaaaaaaaaaaaaaaaaattcagtgagagtcaaaagtccaacatgaaatacaaagtgcatagagggagaagactaataaaaaatagtatgtgccactcttattttttagcttttattcaatttaattttaattttaatttatataaaaggctatgatgggatttttctctgattcatctctgcatgcatttgacttgtaattaacttctttattgataagaaaattgtaggggcatgaacttccctgaaatattttggaaatagagaagagagcataatggccacatatagtgcatctattccttttactcctccttggcctttgttgactattgtatctacatgttccctgcctgacttggttttaattcatttatctccctgcaaaacaatgctgttcttcagcttcccaactgacacctaataaaacctatctcaccaccctcctctatcatacttgcagccaatccataacaagtgtaggagataatcactgctgaacagggtaggagctaaaggagagaaaaacatctggggtttttaagtaacatgctacatgtcaggcctaatcaccaaacaggaagagaaagcatttaagtctaattttgttataaaacttttagttcaagtggagaagtatgcaagctgcaaataacaaaagtcgtacctagacagttgtcaaactttcaatagagctaatgactgccactaacaacaaatgcacttaaatgacttttaccaaaaactaaggctggtaagactgagttattttataccattggattaggaaggaaataatctgtattcttttggctaaatacaatttttgttattattgataatctagcatttagatacaagctctgccacttaagatacatgaatttgaacaaatcaaatctctcagagcctcagtttcccttatgtgcaaaagtaaaataatatctgacttatgttacttcatagggtcatagaaaccaaagtagtagcaaatccctgaaaatgctgaaagtattattcaaatgtgaaataacacttaatcatcactactttatagccttattaacttccagctcataactacatatttactacataaatatgaattttaaaaatatttctattatcaaatgagtaaataaataccttaacttctttaaaatacttactgagtagttgaaaaacaaaaataaaacattaaaaggtattattatttagtttaaaagtctaccagaaaaaaataaaactagtaagtttgttcaaaagtaaacactaactcaaaatccaaaagaaaactgtaacagttttaatctcatcttaactttaaggcaaactcatccatcattcaatactgtttaccttgtaagagtgttgcaatctggagagatttctgagatggatgttctttcagaatgtccaagacagttctacctaagctatcctttatgttggcatcaattcctgaaagaaaaagaaaaactcactagatatacaccactgaagtatcctcaaaagatactatcactatctaactgctgtaatttcagacatatacagaccaagcattgaaagtgatttttaaaaaattaagttctacacacacacatacacacacacatgcgcacacacacacacactcacacaagattttagcaagaaagaaggcaggggcctgttgctaccaaagattaggaacattcttgatcatcaattaactcttaaagggcactgacccaatgtttaagattgtttttcaggaccctatgatatctttttttttttgagacggagtctcactctgttgcccaggctggagtgcagtggcgcgatctcggctcactgcaagctccgcttcccaggttcacgccattctcctgcctcagactcctgagtagctgggactacaggtgcccaccaccatgcccaactaatttttttttttttgtatttttagtagagacggggtttcactgtgttagcaaggatggtctcgatatcctgacctcgtgatctgcccaccttggcctcccaaagtgctgggattacaggcttgagccaccacgcccggctgaccctatggtatctttgggttataactatttaactcaacagcacactatcacactgaaaaatattattgatttagaatgtgaattcctaaagtataatggtcatgtgatttatattctctgtacaatatggtaaaaatatttagtaaattataatcatgtaccatgtaagtaacataagaacagtcttagaacacttgaatattcacaaagttgaaaaagcatgattattttgaattgttgtccacaaagaatttatccaaatacaaggtcaaatactctatgatatttatttatgcaagattgtatttgtcagtcacactaatcatccacctgacgagcaaacttactgaagtgtgtaactaaaacacctgttattattttagttgtggaaatatatattgtaagaaagaacttattttaacacagcaaatagctttcactgccctaaaaatattatgaattttccaaacacataattgcaaaaaaaaaaaaaaaagccagtttacaggatctggtcccaaatgttagttcattgtaagattattaaatacatgtttaaatttgcataggaatgtgtaaccagcacatattaatatttaggtggtttcctcaaatcatttgttatatcaccacactgcatgacaaagttaaatataaatgaaattttaactttgttaaattgtgtacaaatacaatcacaatacaacagtctgccaatgtttttcatttttttttacagaggaaaataaacacactatagtccataacatgaaaaattccatcagttgtttacaagcatgaatttgtacccatgccttttgatctttaaaacaaatctgaccttaattctagctctatttcatctcaatcagaatgcacatatgaaaataaataagccaactttattgttccttcaaagcactccctttaaaaggttccctttaaaataagtttctgtagcctactaacaatagctactcagttaatgaactaactagaaggacaatttaccttaaagagagggaactcaaatctctgtttaccgtagtccacaatataaaacacagaaaaactattatgttcttcaataaatcaagcaattgtgaaaatttctcaaggatcaattcctctctcttacagaaggcagaaatttcctttttcttttggtagttcatctctaaagtacttaagtgcataaaattgtaataacaaagaggtttgtacttaaaacatctattgcataaaagaagttgcacattgatatcaatgttatctaaatactgaaactcagttctacataatatgaatacatatctgcattttagagtaaaggcaagagggtgatttgtgaagaaaactgtgtcattttcctttgtctattcccaaaatagaaatgttatctgtcaggataagctccatgcagaatcacaatagttacctgtttctaacagaactcgtacaacatccacctttccaaacaaagctgcttcatgaagtgcactccccttttctgtctggaaaaaaaaaagtaagaaaaaagaaagcacggttgcatttggaatgcttacaggttgaaataaaatgctcacattttacatattcatacatatttgctgtaatctcagctctccctaacagaaaggtcatgtggaataaagaagagattctaaaagcaaaatccatcggcttggggattgtaaaatacctctgcttctaaatagaaatttgggccagatgcagctgaggcggatggatcacctgaggtcaggagttcgagaccagcctggccaacatggcaaaaccccgtctctactaaaatacaaaaattagccacaggtggtggtatgtgcctgtaatcccagctactcaggaagctgaggcaggagaatcgcttgaactcaggaagcagaggttgcagtgagccaagatcatgccactgcactccaacctgggtgacagagtgggactccatctcaaaaataaataaataaatagccatttgactttcttatgtgagtatttcaccttctcttagctttagctctccttaagtataaaataagagaagtaatgcccacctcacaaggcttttgtgactatgcaagaagctcatttaatcagcatgcatttattaaacaccaattataggccaagagtagctgatggatattctgaggtatggaaatatcatcctggccctcatatattcacattctatttgaagagacagatgtataaacacagatgctccttgacttccaatagggttacctcctgataaagccaccataaactgagtatcccttaaattgaaaatgcatttaggctgggcgcagtggctcatgcctgtaatcccagcactttgggagccaaggcaggtggattgcctaaggccaggagttcaggaccagtctgaccaacatggtgaaaccccatctctactaaaaatacaaaaaaattagccaggcgtggtggcatgcacctgtaatcccagctactcaggaggctgagacaggggaattgcttgaaccagaaaggtggaggttgcagtgagccgagatcgcaccactgcactccagcctgggtgacagagtgagaatccatcgcaaaaaaaaaaaaaaagaaaagaaaaagaaaagaaaatgcatttaaacacaggtaacctaccaccaaacatcatagcctagactagcctactttaaatatgctcagaacacttacattaacctagtgttgggcaaaatcatgtaacacaaagcctattttatgataaagcattgactatctcatatactgcatatcgctagcctgagaaaagatcaagattcaaaatttgaagcatatcaaaaatgcgacagtttcacaccattttaaagtcgagaaattgttaaattaaatcattgtaagttgggggctgtctgtaaatatttatgataaatgaaatctaaacaatttaatgtagccataaaaaagaataaaatcctgtcattcacagcaacatggatgagcctggagaatattatgttaagtgaaataagtcaggcacagaaagataaataccacatgttctcacatatgtgtgagctaaaaaagttggacccatagaagtagagagtaacattatggttatgagaggctgggcaggggagcagggagaggaggatagggagaggttggtgattgactgcgaaattacagctatataggaggaagaagttctagtattctttagtagggtgatgatagttaacaataattgattatatattttcaaatactggaagagaggattttttaatgttcccaacacaaataaatggcaaatgtttaaggtgatagatatgctaattaccctatcattatatactatatttcatgtatcaaaatatcactctgtacccctaaatatgtacaattatgacatgcaattaaaaataaaaataaatttaaaagccaaaaaaaatttaatgtggcttaagaaacccagatgatattttctccctgctttcctctccgtcccatcctttgcccatcacaaccctcttccaaacctcataccctatgctccaggcatactgaactttctttttttttttttttttttttgagacggagtctcgctctgtggcgcaggctggagtgcagtggcacgatctcagctcactgcaagctccgcctccagggttcacaccattcccctgtctcagcctcccgagaagctgggactacaggctcctgccaccacacccagctaatttttttgtatttttagtagagatggggtttcatcatgttagccaggatggtctcgatctcctgacctcatgatccacccgtcttggcctcccaaagtgctgggattacaggcgtgagccaccgcgcctggcccctgaacactttcataatcatttcatattgctttcttccacagggggtctccaaggctggtctctctgcctggcaggatctaactcctagcactcttaatctagccatctagatatacctaccactagttaattttcagcatgaataagaaccatgtggagaaactgtcttaaaaacatacttctgggccccatccccagagtttctgattcagtcgcctgagattaggccatagaatttccatttctaacaaattcccctgtgattctgtaggtctaaagagtatgctttaagaaccataaacatgtacgatatctcgaatcttagcttaaaataattgcatttataaagacatccctgacccctgaagtttagtgtttttcctggatgttccacatcaatctatattttccttatcacagcactcatataccacattataattttatgtaattgtctggttcccataataaactgtaagttcagcggaaatgtaggccacatctattttttcaccattgtatccccaatgcctagcaaagtactttgaaaatatagatgtttaggaatttttctgagggcaagaagtggagggagggaagaacacaggatgaaaaactaggacaatttgtgagtagtgcaggataagactgattctgccttcaggaagctcaaggaagattccaaagatgaagctttttgagctacacgaatgttagttgtctcttttttttttttttcattctttttcttcttctctcaagaatctaacaagtatcagtaggtcgtgtgtgtgtgtgtgtgtgtgtgtctgtgtgtctgtgtgtgttttcaattgaatagtgtcaaggtagcaattttgttgccctatactaaatgtgatctctaaagtgggattctaatctcaacctgaaatagaaatatcactataaaataacatacaatgtaaaaactcttttttttttctgtttttcttttttgagatggagtcttgctctctcgcccaggctggagtgctgtggcatgatctcagctcactgcaacctccgtctcccaggtgcaagcgattctcctgcctcagcttcccaagtagctgagattaaggcatgcgccaccacgcccagctaatttttgtatgtttagtagagaggggctttcaccatgttgaccaggctggtcttgaactcctgacctcaaatgatccgcccacgtcagcctcccaaagtgctgggatcacaggcatgagccactgcgcctggccaaaactctttaataaaagtctattatataattaacccaatctaaagtagataagtacattattaagcaggcttgaggaacactgaatatcaatgtgatctgactgtatcttcaagatggaatgactgaaatgcccttgaattataatctgactggcatgatatgtagatactgaaaaaaatggaaacaaaaaaataatttgtaaatatacagcacagttttgaaggaaatgagaaactggaaactgattcggctcttaagaaaatatttcaatgtggggcatgaacattttattttttcccttccttaaaaatattccttgaaataatctaattttgctcattctcatgctgtttttcaaccagatttctgattactaatttgattcccttacacttttcacaaaattttggacttgatttcagataaatccttcctgatatagcatacttcagttcattctgaaaacaaaccaaagaatattttaattcaggattgcgaggggaaagaaatagaattccccacagccttagggaaaggcgaggacagaaagtatgaaccccagggggttagctttggaacaggtatttgttccagggagtctgtcaaccaatgctagactagtgcctggactttaaccagccactcaaggtacgagtggcagtggggcagaagacagtctgaagtctaagcaagctgaaagtttaaatgagggacccctacaaaactctaaaacttctaaagaacatcctcagtgaaaattaaaacaacaacaacaacacattgcacagaaggggaaaggatgtctaactaggtcttagttgtagatagagtgaaaaaagtaaatccccctaagaatgcctaaccacaattctacactcacatggtaagtttaaggcaaaattgtacaatctctatgaactccagatcctcatccaaaatgtagaataaagtggtcctgggtttctagtaatacaggcagatataaatgcttagaaaaaagcagatataaatcccctctgtaaaagtacactttcaactcaggcctccaaatattccagcagatgaagctctaagaaatacaaattcaaaattataaattactgaatgtgaaaggaagcatcccaccatgaacaaggattagtaaataaaaatacaaaagaataaaactcacaaaaatttcacatattgaaatggtcaggtatagaatataatacatatgtgataaataagatgaaagaactagaacaaaagaataattatcaaaattgaccagatgtgaaaatgaatcaaatagcattctagaaatagaaaatataatatttaaaatcaatggcttaataacatataaatagctattgaaggggtattaaactggatgatagatttttttaagtacataattgatagggtttggctatgtccccatccaaatctcatcttgaattttagttcccataatcttcatgtgtcatgggagagaccggctgggaggtaatttactcatgggggcaattaccctcatgctgttctcatgatagtgagttctcacaagatctaatggttttataaggagcttttcctcctttggctcggcacttcctcttgcctgccaccatgtaagatgtgactttgctcctccttcaccttccaccatgattgtgaagcctccccagccatgtgaaactataagtcaattaaacctctttcctttataaattacaacctcaggtatgtctttattaggagacatactaataggagacttaattaggagaacagactaatacaataatgcaataaaaagaataagagatgaaggacagagcaaaattgcagaatataagcctacatcatttgtcttccccactggaacaccgaatattaacaactatctgcacacagaagagcattgtcacaagaaccaaaaatcaagtgaacaatcacagtatctggttttaacttcctactgctgaaatagacactgaggagggtggaagagaaagtcttgaatcacgggcgctgcccctctcccattccatggcagtggccatgctgtgcagatagaaaatctgtgcattttaggaagggagaaagcagtgactgaggaactttacattgaactcagtgctgctttgccagagtggacaataaagctgtgtggggttccgccagtgcccacacattgaggggacatttgcaccagcccagccagaagggaatcacccatggaatgtgagtctctcaacaagcctcaccactgcactgcaggctgaagtgctctgggatcctcagtaaacttgaaaggcagtctaggacacaaggactgcaattcctaggcaaatcctagtgctaggctaggcttagagccagtagacaagattggcgcatgacctagggagacagcggcagatatggctaacgaagtgcctatgccattcctccaccaacctcaggcagtgcaagtgcaattcacaacaacaaaagtaacttttcccttctatttaaggagaggagagtgaagagtaaagaggactttgtcttgcatcttagatgtcagctcagccatagtaggacagggcactgggcagagttgtgaagccctaaatcctggacatttctagatgtaccttgggccaaaagggaacccactgccttgaaggaaagaacccagtcctggcaggattcatcacctgctgactaaagagctcttggagcctaaataagcagcagcaataactgggagtacaccatgggccttgttgtctgagaaatgctggcttcaagggtcatccagcacagtcccagctgtggtggctacggtgaacaacttcttctgtttgaaaacagcagagggaaaagtaaaggggcctttgccttgcacctaaggtaccacttcggccacagtaggaaaaaacaagcaggcacacggggtctctgcgttcaggcctaggctcttggacaacatttctgaatctgtcctggaccagaggggagcctactgccctatagggtgagtctgaggcctggcaggactcaccataagctgacaaaagagcccttgggctttaagtaaacattggcagtgacctagaagaaccctcgtggaccagaagtggtggtggccacagggagagtctcctctgcctgtggaaaagggaagaaagagtaagaaggactttgtaatgaagtgtgagtgccaatttagctgcagtaaattagaacatcaggtaaactgctaaggtttttgactctaatccttggcttccagacagctactctggacatgcccagggtctgggggaactcactgccctgaagattaggatacagtgctgagctggcttcaggtctgacccaacacaatcccagtggtggtttccgaaggggtgtttgcatcaccacacccccaggtacaggtggctcagcacagaaagacagactctgtttctttgagagaaaggagaaagaagagtctctgcctagtaatacatagaattcttccacatcttatccaagaccaccaaggcaatacctctatgagtctgcaaaaaccacagtgttagtgggtttggggcccaagtcccttcaaatgcctggaaagtcttcctaagaaggacagatacaaacaggtccagactgtgaagactacagtcaatatctaactcttcaatgcccaaacatcaagaccatccaagaaaacatgacctcaccgaatgaattacataaggcaccagggacaagtcctggaaaaaaaatagatatatgatctttcagacagagaattcaaaatagctgttttgaggaaactcaaagaaattcaagataacacagagaaggaattcagaattctatcagataaatttaacaaagagattgaaataattaaaaagaatcaagcaaaagttctagagttgaaaattgcaattgatgtaatgaagaatgcattagagtctcttaagagcagaattagtcaagaagaaaaaattaacgagcttgaagacaggtattcgaagacacactgagagtctacagccataccgccccaaacgcacccaatctcatctgaaaacacactgagaagacaaaataaaaaaagaataaaaagcaatgaaacctgctttcaagatctagacaacagtctcaagagggcaaatctaaaagttactggccttaaagaggaggttgagaaatagttaggggtagaaggtttattcaaagtgataatattggagaacttcccaaacccagagaaagatattaacattcaaagacaggaaggttatagagcaccaagcagatgtaacccaaagaaggctacttcaaggcatttaagaatcaaactcccaaaggtcaaagataaataaataatcctaaaagcagtaagagaaaataaacaaataacatacaatggagctccaatatatctggcagcagacttttcaatggaaatcttacaggtcaggagagagtggcatgacatatttaaagtgctgaaggaagaaaacttttaccctaaaatggtatatctggcaaaaatatccttcaagcatgaaagagaaataaagaccttcccatacgagcaaaatctgagggatttcatcaacaccaggcctgtcttgcaagaaatgctaaagggagttcttcaatctgaaagaaaaggaaattaataagcaataagaaatcatttgaaggtgcaaaactcactggtaatagcccacagaaaatccagaataaccctgtaattacggtgtgaaaactacttttatcttaagtagaaacactaaacaatgaaccaaaaaataatgactacaatgaattttcaagacacagagaatgaaataagacataaagagaaacaacaaaaagttaaaaagttaggtggcaaagttaaactgtatagtttttattagttttctttttgtgtgtttgtttgtttatgcaatcagtgtcatcatcagtttaaagtaatgggttataaggtagtatttgcaagcctcatggtagcttcaaataaaaaaacatacaatgggtacgcaaaaaaattaaaaagcatgaaattaaagcctactgccagagaaaatcaccttcactaaaaggaagacaggaagaaaggaaaaaaggaagagcagaccgccaaaaaaagagagcgagagaaaaaaataacaaaatgacaggagtaagtccttacttatcaacaataacattaaatgtatatggagtaaactctccaatcaaaagacatagagtggctgaatagataaaaaacaaaacccaatgatctgatgcctacaggaagcacatgttacctataacgatacacacagattaaaaataagtggatgaaaaaagtattccatgtcaacagaaaccaaaaaaccacaagagtagctatacttatattaggcaaaataggttttaagataaaaattgtaggaaaagacaaagaaggtcattatataatgacaaaggggtcaattcagcaagaggatattacaattgtaaatatatatgcaccaaacactggagtacccagatatataaagcaaatattattagtgctaaagggaaagatagacctaaatacaataatagctggagacttcaactccccactttcagcattggatagatcttccagacagaaaatcaacagataaacattggtcttaatctgcactttagaaaaaatggaacattttatctgatggctgcaaaatacatattcttctcctcagcacatggatcattctcaaggacagaccacatgttaggtcacaaaacaaatttttaaacattttttaaaaatgaaaaaatatcaagcatcatccctgaccacaatggaataaaactagaaatcaataacaagagaaattttggaaactatgcaaacagacaaaaattaaacaatatgctcctgaataagtgggtcaatgaagaaatcagaaagaaaatttaaaaattccttgaaataagttcatggaaacacagcataccaaaacctatgggacacagcaaaagcagtactaagaagaaactttatagccatcaatgcctacatcaaaaaggaagaaaaacttaaaataaataatctaatgatgcatcttaaagaatttaaaaagcaagagcaagctgaatgcaaaattaagagaagaaaagaaataataaggatcagagcagacataaatgaatttgaaatgattaaaaaaagacaacagatcaacaaaacaagaagttgttttgaaaagaaaaacacaattgacaaacctttagccagactaacacaagagagaagacccaaataaatgaaatcagaaatgaaaaaggagacattacaactaatatcacagaaattcaaaggatcatgagtggctgatatgaacaactacataccaataaatggaaaaatctagaagaaatggataaattcctacatacatacaatctactaaaattgaaccattaacaattccaaagcccaaacagacgaataacaagtaacaagatcgaagccataataaaaagtctcccagtaaagaaaagtgcaggaccgatgactttgctgatgaattctaccaaacatttaaaaaactaataccaatcctattcaaactgttctgaaaaataggggaagatggaatacttacaaacccattctacaaggccagtattaatctgatactataccccaagacacaccaaaaaaagaaaactataggccaatatctctgattactattgatgtaaaaatcctcaacaaaactccaacaaaccaaattcaacaacaaattaggatttatccctgtgatgcaaggatggttcaacatatgcaaatcaatcaatgtgataccctgtatcaacagaatgaaggacaaaaaacattatcattttgactaatgctgaaaacatatttgatgcagtccaacatcccttcctgttttaaaaaaaaatagtcaaaacacctcaatgtaataaaatccatatatgacagactcacgactagtatcatactgaatgggggaaaactgaaagcctttcctctaagacctggaatacaacaagaacacccactttcaccactgttactcaaaatagaactggaagtcctagctagagcaattaaacaagagaaagacataaagggcatccaaattggaaaggaagaagtcaaattatccttgtttgcagataatacaatcttatatttggaaaaacctaaagactccactgaaaaactattagaactgataaacaaatgtagcaacgttgcaggatacaaaatcaacatacaaaaatcagcagcatttctatatgccaacagtaaacaatgtgaaaaagaaaattttaaaaatcccatttacagtagccacacataaaactaaatacctaggaattaaccaaataaatgaaaaatctctacaatgaaaactgtaaaatactgatgaaagaaattgaagatgacatcaaaaatggaaagatattccatgctcatgaattggaagaatcaatattgttaaaatgtccatactaaccaaagcaatctacagattcaatgcaatacctatcaacataccaatgacatttttcacagaaatggaaaaccaatcccaaaatttatacagaatcaccaaatacccagaatagccaaagcaaacctgagcaaaaagaataaaactgaaggaataacattacctgacttcaaattatactacaaatcagaatggtactggcataaaatcagacacatagaccaatggaacaaaatagaaaacctagaaacaaatctacacacctacagtgaactcattttcgacaaaagagccaagaacatacactggtgaaaagacagtcttcaataaatggtgctggtaaaactaaatatccatatgcagaacaatgaaactagactcctatctctcacaatatacaaaaatcaaatcaaaatggattaaacatttgaatctaaggcttcaaactctgaaactgctaccaaaaaactttgagaaaaatctccaggatattggtctcggcaaagatttcttgagtaataccccacaagtacaaacaaccaaagcaaaaatggacaaatgggatcatatcaagttaaaaagcttctgcacagcaaaagaaacaatcaacaaagtgaagagacaacccacggaataggagaaaatatttgcaaactactcatctgacaagagattaataaccagaatatataaggaacaaaaaaactttacaggaaaacatctaataatacaattaaaatattggcaaaacatttgaatagacatttctcaaaagaagacacataaatggcaaacaggtatatgaaaaggtgttcagcatcattgatcatcggagaaatgcaaatcaaaactgcaaagaaatgtcacctcaccccagttaaaatggcttttatccaaatgttaagcaataacaaatgctggtgaggatgtgaaaacaagggaatcctatatactgtaggtgggaatgtgaattagtacaaccactatgaagaacagtttggaggttcctcaagaaactaaaaatagagctaccaaatgatccagcaatcccactgctggatatctaccccaaagaaaggaaatcagtattttgaagagatatttacaatctcatgtttgttgtggcactgttcacaatagccaagatttggaagcaacctaagtgtccatcaacagatgaaaggataaagaaaatgtggtacacacacacacacacacacacacacacacattttcttggagtactatacagccacaaaaaagaataagattctgtcatttgcaacaacatggatggaactggagatcattatattaagtgaaataagccaggctcagaaagacagacatcacatgttctcagttatttgtgagatctaaaaatcaaaacaattgaactcacagagataaagaagggtggttaccagaggctgggaagggtagtgggggcacaggggttagagggaggtggggatggttaaagcgtacaaaaaatagaaagaatgaataagacctagtatttgatagcacaacaggggcactataatcaataataattcaattgtacatttaaaaataaataattgtaacacaaaagataaatgcttgaggggatggatactcaattttccatgatgtgattattgtacattgcatacatgtaccaaaatatctcatgaacccataaatatatatacctactatgtatccacaaaaattttacatttaaaattttttaaatgactacagaaacaaataagcaaagaaggtaaaaaagaaataagagatggaaaatatgaaagatagaataaaataagaggattcaacatatgtctaatcaattttagaggaagaagatagaggtaaataatagtcagtggctaagaactttacataattgataagacactaagttccaggaccagcaagcaagataaatgaaaagaatacatcctggacatatcacagtaaaactacaaaactactaagataataactttaagacactctgagggaaaaaattgcctaaaaagaaataataattagatcaatagcggacttcacaacaaaaataaataataaagtcagaagaaagtataataccttcatgtgacaagagaaaaaaaatctatcaacctagcattctacattcagtcaaactaccttctaaaaatgagagtaaaataaaaacattttcagacagactaaaaatgagtggttacttacaactcttactgaaagaacttctataggatataattcagaaaaggaactgagatgcaagaagtaatgataaataaagagaatggttaatatgaggctaaatctaaacaaatatttaaaaatatgatagtgtctacttttggcactgatttggcttcacagatactttgataaaggatgatgcacactgtagacacggaaaaggtcccactttatacacagggaatatattccaagcaccccagtggatgtctaaaaccaaagatagtactgaacccgaatgccatcaatcagaattcatttctgttcatgtcttccatccacaaattcaaggccttttccatcttaactaagcacttaccgtgcactatagctgtaacttctgtagtttgaggtgcaacagcaaaactagtacaaatttctttttctttcttctcaacttcagatagaggattcattcttaccatagatcttagcaacctctgtgtacaagtttttcttttctttagtaagtcaagaactttcaccttttcacttagaggaagcactttacagcttctctttggaatatgcaaattgtcagcatcactgctcttgtgctttggggccattattaagtaaaatatgggtgacttgaacccaagcagtgcaataccagaacagtcgatctgataatcaagagggctaccaataggcaagtagtgtctacagcacagagatgctggacaaagggatgattcatgtcccaggcaggacaaagtatgatggtgagagttttcatcatgctactcagaatggcatggaatttaaaacttataagttgtttatttctataattttccttttaatgttttcagaccatggttgactgcaggtatctgaaacagcagaaaactaaacatcagataaaggttgggtgggcggcaggggtagggggaactattatattctagacaatgaaaatacataatctccaccataaataaacaaatctctttctggaaaaagcagatggagcaaacctgggttccagtggcagcttggcttttagtatctctgaaaattcatatatcctatgagaaacatattaaaaacctaacagatacatccatgttgtgtgggaaaaattaaaaataaaatacaaattttaaaaacctaatatggttattgggaaggttaaataagataaacatacaacaaataagattttttaagtgttttattaaactataaagtaatgacaagtattatcaataatatttctattaaaaaagcaattagaaaacctattttaaaagtaacctcaattatgttaatattaattacatacatgtatatcctttacattattccaagataaaaatgctatgttaagtagaactaatgttttcatacaataagaagacacagaattcttcaataaaaacagaaaaggttagtagatgataaacatatttttagcctgtaaaaatgaatctgtttttacaaattcaaggttgctgtaattagcttctttggtaagagaacatgagaactgtcaaatggaatggattggtctcataattctaaggtaaacaatggtaccaagaactatttactgctatcacaatgttgtcacatagtgtacagaatgtaaatatgtcaaacccatggacttttcaaaatatagattaattttgtaataatttccttcttttcatcagagattagaaaaatttaagaatattttgccaaggtgtaaagtaagatttaaaaaaaaatcaagtgccttgtggcttatcacaccctagacagagtccgtgtctaattgtctaatattctcactcaaatgagcactattctgtacatctcagcattctgccccaaatctacaacccataaccggccagaccttgaaaaattctattcttgtgaaatatttagtccaaaacattttacaagaaagtaggaagtctacaaagaaacaacactgaacaaggtgaacccaaaggctcccatccctggagatttcagtcctgcttttcttatggatcaaaattctccattttatttaaattaatcatttaaaaaaaacaaaatttccaaaatcgataatcatgcagtttataacacagtgacatttcaaaacttatccagtaaccacacataaagcactcataacatctcagcaccttttaggggaaaaaaaaaagacaaacctctgaacacagtgatgaaaacagctgagcgaaaagtactgaaatgatatatatgttaacatcaataactgaattgttgatgaaagcaaaagaaattctctcattgattggaaatgcctgttaaagtcaagccttggtagcaccaaagctgagaaaaacaagataagtcgcaagcaaaagggagagaagatgacgttcatgtttacagccctgggtttcagcttcccttctttttggcgttatatatttctgtgacttccatggaagctcagttgtgcatttaaagggatgtttgttatattttatccaaaatttctagatgttttaaagtcgtttttaggttatctattctaccagagtgccaaaacagcagatggaaaagggatgcaaagatgtcagagcttagctgcactggtttccccttccaaatttagcactccaaccataattatcctgaagcctgcgaaagagaataatgagataaagaccgattcttgattaaaggagaaaataaagataacaattatgataagcaataatgattgtggtgacgatcagcagagaaaatagcacagatagcataaaactgtgagaagcaagacccacaactattgtaacaactggtaaataaagataaccttactggagatgaagaaaaaacaactagaatggcatttaactcagaaataaaattccctagtaccctgtttggtacttagccacgtgggcacctcttggaattaaaaaaaaaaaaaaaaaaaacaaaagataacaactcaacttagtgtttgacaacaaacatatgatgtctgaacaagttggaaggcagcagctcttttgcattatctagaccatatctagaggagtatgttcaattgtgggtatctaacttttaggaccaatgacagaatacaatgtgtccagagaagagagtgccaaagaataaaggacctagaaaaacatcgtgtgaagaataaaggttataagaatgtttaaactgggaggaaaatggcacaagagaaatatgacatgtcttcaaataattcagaataccattgttgctattcaaaagaagaaatctccctctattaaactagggacttcaagtcttggtctttactcattctctcttccttcacttcatatcaaaggaagcacccttcttttcattaacattatttctccacttgtgctctttattctatcactttctgctgcttcttgaattttgatcatctctgcctcttgcatcttcaaggcaatctttctccataaacatacacacctttccactatttaaaaacaaaacaaacaaccaaagaaacttcctgtgaacctgctttcacttcaagcttctatccgctatcttacttttctttattccacgctttatgaaaagtcatcttccctcttttaggcacaatttttgcctagttttgttactgctatatcctctggcacatagtaggcactcaataaatatatgataaatgaattgattacatgaaattgtgctgtcttggcattcctcttttaactgcttctttacagacctttttccagaaactccctgaatattctttaatcagcctcttctgtctccctacattctgtttcttgtaagcccttctatctcatggcttcatctcttactcctctgaggctagcctcttagaaagttagcctcatttaaggagcacatccaaagagagacctctctgacccttccgtctcaatcacagcacccagtttgtttccattatagcactcactgcaatttatcatttttatgttgtttatgtgcttattttctgtcatccctactagtctataactccatgggagcaggaaacaaattttcttcctcctggagcatagtgcctggtagcatggcatgagaagtcaggaggggctagggtatcctcatagggaagccagggttcagttaaaagtgaaagaaagggagttgcttgggtagtgagtaaggtaagtaaaggaaggcctcactattaaggtgacattggagaagacacctgaggaaagaagggggaagaaagtcatgagggttagtaaggcagaggcctggaggtaggagtgtacataatgtgttccaacaagaacaacaaggtcactgtggatgaagctaagtgaagaagggcaaagaagagtaggtggtagctttagagagacagtgaaactaagtaatataaaaccctatcagacactataaggactctggcttttcctctgagtgaaatggaaaaccaatagaagtgtttttgagtaggaaaatgaaattacctgactgaatgggatcacttctggctgtttgactgaaaatagactgaagggaatatgttatggattgaatatctgtgtgccccaaaactcacatgctaaggccctaacctccagtgtgactgtatttggatatatggcctttctggaagtagttaaggttaaattgggtcataagggtgtggccctaatccaatggaactggtgtccttataagggaaagaggaaacatcagggaactctctctccattcacgcacagaagaaaggccgtgtgaggatataacaagaaggcagccatctaacaagccaggaagaaagccctcactcaggaatggaattggccggaacttgatcttggactttgtagcctccagaattgtgagaaaataaatttctgttgcttaagccactcagcctataatattttgctgtggcaacctaagcagacaatacagaagccaaaaaaaaaaaaaaaaaaaacggaggaaaactagtcaggaagcaagagatgattaggtcttggactatggtgttaatcttgaagataatgtaaagtagtgaaattctggatacaatttgagcacagaaccaataggatttgctgaagaactgaatgtaaaatctgaaagaaaccgtaaaattctgggccaaacaactagaaggatggcactgccttttgacaaaatgggaaagacttggtgatatgcaaatttttgaagaaaggggtacagatgctagattttcagctttggaaatgctgagtttgagaagcctattagtcatctgatagatatgtccagtagggaattacatacacaaatttagagttagggtggagtctgagatgaagaaatagacttggtaattgtcagataaagatgatattggaactcaagagattggatgaggtcaatgaggaagtaggtatagacagagatgaaaagatgtttgagtactaagccctgggacactccgatgcttagagatcaagaagatgagggcagttaactatggaatagggacacgatagattacattattggcctctccttttatatgctctttgccgtatgactttgtacttctttccacttatatgagttgagtatatttctcttcctctttatttgaggcttggttttgtgacctgatttagccaatggatggtaaccaacatgatgcaagcagaggcccaaactgtgcttgcatgattgagctttctctcttatgcacaatcaatgcccccctgcctagtcccaggaggaagataatagacacgtgcagcagagattcccaggctaacttacagcatcaaacatacttcccccagcttcttcaagaagtcaccagtgaactaaatgaaaaccaaaagacagtcgtatctcagaggtcaaaagaaaacggtggttcaaagaagagacagatactgactttgtcagtgctgatgatgaatcaagtaagaggagaagcaggaattgactgttggatctaaaagtatgtcagtcattagacaacttgacaaaggcaaaaacaaggacttttaaaagtgagggagttagagtggcctcaagagagaatggaggaaagaaattggatacaatgagtaaaaacaagcttttctaactacgttgctacaaaggggtcagagaaaggggatggtaaggagaaggaaatgtgagatcaagagagtttttaaaagatgagaaatattacatctttgcatccttatggaaatggtacagttgagaaagaaaaaacgtatggtattaaagacagaaaatatttgtcagagttcccacgtggacaagaaaggataggatccaatgaacaagtagagaggaattagccttagatacaaacctaaaaggttcatttaaagcaccaggaaggaaagtagacacaggtacattggcagatgtggtggtggaaatttgtgattgcttgtggtttcctcagtgaaataaaagcagtatcatgatcagagagggatgatagagaaggaggtgttgaagttttggaatagagatgtcgtgaaattatcatctagggaaatcagagagtaaatggattataatggataattatcgcctatgtacatatcttatttctggtgccactataagcctttgagagcaaaagctgtatcttacttagttttgcatcttaacagctcttagcatggaaacttgtactttttattattaactttctgtaattttactttcatttcctttaatagtcacataaagtctaattggcttaaggttgtactagttctttaactcttcaagtcttatgagagaaacttataagaaactcacacaatgaaagcactagcatgatatggcactatcgctatctggttacccaaaatcaagttcaaaattcataaaaataattgctaacttcaagagaaaactgcccattcaaccctactttcttaatatcttactttgactgattctctttattaaaaaaatatttaaagactaaagggtttataagtaaagatgatatgaaatttgcccaaagtattacttactattttaaatatgtgttataatttaaaattactcagagagtaatgatgcagaaaataaacttctagagcaaatattaacatcaatgctgcatttaaaaacatatgtaggtcaggtgcagtggttcaaatttgtaatcccagcactttggaaggccaagaaaggaggatcacttgagcccaggagttcgagaccaacctgggcaacatagtgagaccttttctctacaaaaactaaaaaaattagccgagcacatcagcacatgcctatagtcccacctactcaggaggctgaagcaggaggatcacttgagcttgggagttctaggccgaagtgagcatgattgcaccactgccctccagcctgggtggcagaataagaccctgcctttaaaaaaaaaaaaaaagtaaaataaaataaaatcacatgtaactactaggaaaagacaagatcctcaaaagccatctataagttttaaagatttattcataataacttgaatgtaattgaagtctaaaagtacaatactataatttaccaaatgggattacttttaatactaattcccaacaggttagctagagcagtttaatgaatattaaatctactgaaacaatttgaggctactagctacattgttcactctcagccagtgagaatatcaacaaacctacttgatattcaaaaattttgcactgagtctgatgggaaaaacttggtaacaattaatttgagtaataaaattaaatattcacccccccccaaaaaaaaaggcaatgagaccaaaaaaaaaaccaacatattttctatgaacaaagcaacaataacaaaagcaaaatatcaactaaggctaaatatattatggaagattcatttcattgagatatattttagaaagatgttgtcagttctacttcctagaattcttagaatgagtgtcaatagaagaggttatagcaacacagaagttgtccaccttactcagacatcaccccgatacttctgattaggtgttcaaagtgatctaagcatattgtctgcctttcttctgatatgtgaagaacaaatctaaatgtggtgaggaccaagcagacaatctaaaggaatgacaatggcaatgatataaaatggtagaatgaggtcggagccttggaaagcatttaccccatctaaaagcactcaaattcaatattttaaaatactctttagccaaataatgcacatatgcaagctaaaggccacctaaaattcaaagtcgtgttggactttcaaaggtccccttcaaatgtcacttccatcaatgacttctcatgttctccctcttaaaatccatattttcctcacccgtagatccacagctctttgttttagcatttattatatgtcatggatgggagttattcttgcaaattttttgtctcctccactaagcgtggggcagagatagttttggttttttattctccaaaagcacaaaatacagtgttttgcagaaaaaaaggacacatcatatacatttataaaattgaatttaaactctttcccttctggtcatgtcatctagtacaaaacatgaaaggatcttggtcagggataccaagaagcttactgacctcagtcagaggggaagtccttggttatattgcagtctgtgcaatcaagtttaaaaatattacagaagtgtgaaagcagtacatccagattagagaaattcaacatttatacaataaacatctagtttatcattaaacaacttttaggaaaataactttgtgagtcacctacaatagtaagcatacctacttattttcaatacccctttgaggagagagactgtttttccttaatatgactgttagaaaaaattcttatgcttttttgagaggctgccaaagttgaataaataagaaattgagaaaagatattacaaatatctaaactactaaataatgcaggcaaagctctaaagcaagctctggttcagggtgctagccttaaaactgagattggaaggcctgagatttttctaaattcaataaagaaaactctggaaatacaggattcaatctctgaacaattcctaggaaatataaccccatctgtgagcacgcattccacctggagtgtgtaattatttgcaacatttgccacatttagtccctctgggtattcacacccttttacaattcacgccctcttctaatacagaggtagactctattttccaactccttgaatatgggttgcctttatgacttgcttcagccaagcaaacatggcagaagtgaaggtgtactagttccaagcctaggcctcaagaagccttgtacaattctgttctctctctcagaaccatgcatgccatgtgagtaagcccaggctgacctgctgaatcatgacagagaagtggcagtctcacctatcaccctagacaacatccagccagcctctgaaacagaaacacataactgatttgcagttgatttcacacacaagagaacacagccaagaccagaagaaccatcagttgagcttagactaaattgccaatcacagaattatgagctaaataaagagttattgtgttaagctattaagttttgggatagtttgttgcacatcaatggcttactaataaggggagaaggtcacaatatgacagaaagcaaaaaagtctctggaagataagaatgctgccattaacttggaagccaagaaataaccatgaaaggaggaaaaggcaaaaaaaaaaaaaaaaaaaaaaaaagactaaccctggagttggggctaacttaagacaagatatcaaaagtaggctgtggccaggcccagtagcccacacctataatcccagaacttggggatgccaaggtggaaggattgcttgagcccaggagttcaagactagcctgagcaacagagcaagacctcatctctacaaaaaatacaaaacttagctgggtatggtggtgtgtacctgcggtcccaccagctactggagaggctgaggcaggaggatcacttgagcccaggaggtggaggctgcagtgagctgagatcacgccacccaccactgcactctagcctgggcaacagagcaagactctgtctgaaaataataataataataaaatatactaaattaaattaaactttttaaagtaggttgaccattccttgtggagaaacaaaacctatccaaatcctattcttcctacaaagctcacctcaaatcacaccttttccatttttttttttctgagtgtccttaggcatagtgatcattccttcattagttatgtataaacagtacattacggtggaaagaggcctggactttaatcagtaagtctaaattcacatcccggttttatcaactatgtgtccttagacaaatttcttaaatctttgaatctgattcctcatctcttaactgaaatttaatagttctcaatcccaaaggacagttgtgagaattgaattctaaatgtgtcaacatgctaaacacaaagtacatactcaacaatgttaaagtgaattttgttccattcattcattaaactctgactggattcctactgtatgttaggctgtgtgctagatattgggacaaaggaaacaattactaatgataccacacacaactgccatctactaacttctcatgtgtatagccctcaaattagaatgaggttagagattatgccttgtagctcttcatatttcccaaaagtaggtggcatagtaccttgaactcagtagttacaaaagtacttgtgaacaatttgattaaaagatttctacatacaggttttcacatttgaatcccaaagccaagcaacagcatcatcacttttaaagcatagctaaaagcacactcacttgacagctcacatccattcctgcctccagcagcacctgcacgactgctttgtggccattgcgcgcagcaaggtgaagtggcgtgtgcttgcgagtgttgcagctcattaagttaggatgtgcactgatgatcatttttaccactctaagccgtccgtagagtgccgccaagtccaaaggtgtttccagcttgctatttctaattgtcgggtcagtgagctcttctaggagaacagcaactacttctgagtgtccatattgagctgcacagtgtagggcagtttcattttcattgttctaagacaaagatttttaaaaaggcacattttcagaaattcaatttgttatcaaaatcttaacacagtaatttaaaacctgcaatgctttgaaatgtaagttaagatttatccattttaacaagtatgcctaatggaattttatatttgataaaagtatctaggattcattgaatcaaaaaaaaattttttatatcactttaatcgaaaacaatccaacatttccctaaatcatatatgccaacttccaaaaatgacaaatgatttagccatgtttgtcagaggccctcctgggtccagaaggacagtgatatctgcatggtgcatcacatctttagacatttattaataagagagatcaaaacaattataacagacttttaatagactggctttccaaaagacagataagaaggtaaattcttggtaacaaaaggtttatagaaaggtttcccaaattaagtttcattttattttccatgtaagtacaaatcattgcttcctttgcaaagaaaatgaaaagattttggccttaagatataaaagtacctttttgaaatgttatcatgggttgtgaggatggacctagatcagttcccagacaagttactaggagtatcacagtacaacatgtgcagcttataagggttcagttgaaaatcaatgagattttcctagaaatgtatcaagatttttaaaaatgttaagatacagaaaactgaacccagttgcaaggcagagggacccttcagactatttgagcaatataggtagatggtgtataggtatgtcaggaggtggaagggtcaggagaaaaatgaacaagaaattttagtaacaaaaatgcaataaccgtaaatgagggttctggaaagaaagagcagctgccaccatcagagttatcatcatagctaacactatgtactagacatagttgcattttatatatgtttactcatttaatcctcattatgagatagatactattatcattatctccattttacagatgagaaaactgaggcactgaatagttgaataactggccttccgttatacagccatttagtggtaggaccgggatttgaacacaagtagccaagacccaaagtgggtgttcttaaccatcacacataccaccttccaaaataggaactattactactactacttgttgagtgcctaaaaactatatatattgtctcatttaactcttacaacaattctccaaaatttatattaaaattgtctacttcatggacaagtaaactaaaatacaaaaaggttaaattacacatccaagtagaattaagatattttgcaagctggatctgacaaatccaaaacccatgctctttccactataccatgttgtctgccatgtgttgctatattgtcaaagaagagctgggaattagtgatctgaaagcagaatttctagaggttttgctcagaaaaataccaaccgagaatagggagtagctgtttagatagctgttctgatgaaaataaaaggataagaagtgttcagacccaaacaaatcttaatgttctagaaagtaactcaagtttgccctggatgatagaagaatgcaagtaagttgagagtctagagggaagatttgaaaatttaaaaaggagtagagtgacaaggggaaaacagcactaggaaaggcttcttactactttaccttgcaaataagtatcaagagagagcatttgaaggtcaaacccacagggaaaaatctactctttcaagacaatcaatgaaaagttaagacctgttagatggggaatccagctgagggtactgtttcttccatcatttgtcaggagtccttctttacttggtttgaaagtattactataatctacttcttcataaacaatgatcacatacaggtttagactccctggtcttcttatctgtttttcttatcaggcttataaaacagccaatcttattacttcacaccatgaaaacattatacagatatatacctcctgaccaacccaaatttccccctggtctgaaagggattcaatctcagttttcaaaatacagtatctctttgagaaaagagaaaggccagttatgaaataatgattcctcaaaggcctctctactggtccagagccctgagcctaggaaattacaagagcaaaatcgaaaaattttctagtaacaccaattagcactgttcagatctcaagggaaaatatatcaatcattcaagacctactcaggataaaaagttcacagattttatccatgatcatcacatacttggatcgtcacctcagtggacgccacaacggtggtacttttacgagagcatgattgtgtatttgtgtatgctcacaagtgatctaaaataatctaatttgaaataaataggctgtgatgaggcactgattaataattcctagtatggctatgcagaatattcttaaaagttttttaattccttcttttttaccaaatgggtattctctgaaacattaggacccttccagataatggatgatagaacaaaactggctaacaaaagccatttaccaaaaactcttggttcagagtaaaacatctaacaagagttggattcgagtttcggtgaatggcaaaggcaatgtgtttttcagataaggcccctctgggttttgccctaatgttaaaataaagaaaaaaaaaaagaggaagagaaggtaaagggaagaaaggattaatgaaatttaaagaaattgaaaattttcaatttaaaggaaatttaaattgcaaaaaggaaataatcagatgataaaagagaaggatgtggcaattataaaaaccataatccgggtagagtccactttgtttagaatggtgaacaagacctaggttgaagtgttaccatgtaaattacttcatctctccaaacctatcttatctgtataatgagaatattattttccctataaaccttataatatagtttataaaccaaaagagataacatatttttaaaatgcattgtaaactttaaatattaaaatgtagaatagaattatttttaaagaaagctgtattagaaaccaaagataactttcagaaatcagaatgaagccctgactataatgcataattttaacataacataaatgtattactggttgagagcttaggctttggatcagaaaaacctgcgttcaaacactggctgcatttcttagtagctgtgatgttacggtcaatctactctatctctctaaggctgtaactccatatatatagtagcaacagtaatctagggcttagtaagataacggggatgaagtattttgcacaatgcctggcacacagtaaacaatccattaagtgataggatttaggatgacaataccaatgcgctgttgtgtaaaaggctctggagtcaaagtcctgagtctcagtctcagtttcagtcactcagtaacacgtggccttcgacaagttgtttagttttacagagcatgatttctcaactataaaatgcgagtgatattatcaattcagaggattattgtgagaattcattaaatcgtatttttgaggtgaaagtgtttagaacagtgcccgctttaccttatgtctcaataaatgctaattaccatttttatttcctttattgtttaaatacataaaagtttataattaacaagaagattctgtcctattcagaaggaaaaaagaaagctaaaattaaaagttatctataaaaataaaaatcctacatcaaaaaatttaggagaaatggcatagaatgggaaaactatgatcagcatcaaaagagtatacatataacaatgaaaaaatactaaaattatggtattaaaaatcgtaagaaagttgcaacttcttgccaatagaaaccgcaacacaaagcaacagaggtgaacaaaggactttgaatatggtctccttaaaaagacactttttgtaatttaattgatctattcaacattaccaaaaacaagtatttctctttaaaacatatagcaacttttcactttcaaatgtaagtgaatactatatgttatttcttattttcatgtcatttaaaaacatcttgtttgtaaaaactaacatcctcttgtttaaccttggattgtttttccattttattatttcaggtttgctttgcagtattcagacaattttaagaataaccaccagatggctcatctcataaatgatctaactgttggttttctgtggaagagaagagcattgtcataaatttccttttagcatgatatgatgataaagatagccatatctgtcatgttttaaagactgggtgcattcttattaaaatttctgcatttttgtaacctgtaaacatggaaatttttattgtgataaatattaataagatacttttccaattaataaaatgttttcctgattagtcctttcaacaactgcatatatattttcattgaaaaaatatgtatttttcttccctttgctatttacagcaattgttactttttatccttcagtctgaatttcaaagtccggcaaagtctgcatccatttgaacaatatgctaattgtgctttattagatatgcttgccctaaagtaacctacttgcattgatattggacaactgccaacctgcagcttaatgccgtgattgtaattcaattgttggactgtctgctggttttcaaatatagttttacaaaatgggaacagtagggggcatgcagagatcaacatgtttgttatcatactgtattaggggaccatattttactttctagaatctgtggtcctatctgtttagaatactgacactggttttctttttaaaatatgtccattatgtgtaatatagatattgtgtacttacaaatacattaactgtcagaatcatactgctgctgtgttttattcaacttattctgggcatatgtgtttgtgtttgtatatatatatatcaaaaaattttaacttaatatgtgacaagcaactgtatatgctatatttcacattttgattcacaagagtacttaaccatgaaagtgctaagtaaatggtaaagcattatgcaaatgataggcatatcattgttttagcattcaaaattgtattaagaaacattgtaattctcattacacatatgaattctgttctatctttaaatattcaatggctataaaatggctgattatataagacaggcaaaaatatttcagctacttcctttatgtaggattttcccattaacaaagtatctttacaaatgcccaacttagtccctgcatatcatatccaaacaccaaagaatttttcaaatttctccttttaggaaattcagcaatggaaaggcctttgggcaaggtaaagataaaaaaatcacattttcaatatggctttgccttgtaaaactagaaaaattacatcatgagcaaacatttggcaagtgcacctgttcattgaccctggaatgtgatggtccatgatgaataagaatcttcacaatttccacatctcctttccaggcagccaggtgaataggaaaataccctttgttgtctgctacatttgttgatgcctcatactgaagtagtttgagaactatgtccctaaaaaggaaaaaacaacaacaacaaaataggctgagcaagacaaactgtattaaataggtaattttaaaagaatactagatgctgggtgggaatttagagtaatcattcaaggtactaagatataaagttgggtttcaaagtttttgcctactcaacatttggctattttacttacctggaaaaccatcaccccatgccacacacacacacacacacacacacacacacacacacacacacacacagagagagagagagagagaaagagagcgagagcacacattgactaaccaattaaactacttaatagaattcatataagcaaaacttaacttatttcattaattagatgagctaagtaaaatgaagaggataccaactcccatttttttttttaaaaaaagagctctttccagatagcccatatctgagatttagtttgaaggaaaagttgaagttacaagtatattccttgtttacacacacacaaaaagttatcataataccaaggaggcatttataaaatttacacatcattcctacagataattggaataagagatttaaggggtatgtaaaagagaaagaaagtgcagtatgtaagggacccttgacaagctaactgtagtactagcccagggttaaaaaataataataaaaaaattttaataacttctcagtgatggcacacaacacactttgagtattccttgttcctacttctgtattccttcacctttcttctccaagcataaaaaattatttcaaaagggaaactcatttaaaagacaagttccaccattaatgcaatttcaacacatattcaatatatcctacctcaaaaattttgaacttaatccccaccaggttttcaaagtaaaaatcctgacctgcattactcaaccttagaaagaattaattaataattattagcataaattatatcaaaatatatgtcaacaatcaaaagcagtaattctaaacaaaactgtattttcatttggatgcatttaagaagcaaattctattaactcactaaatgaaatgctagtcagacacacataaataaaaatatatatataattacaatatataataaagttgtttcttacatacaacaaatcactaatggggagggtgaacataacagatttacatttaaacatttcataaaatcagactctagatgcaagtaacaaatgaaaacatttggaggaaattttaatagaaggaagattagaattttgatagctcacaagaaaaacagatatgatatgatacaaaattatggtaaatggtaaaacatactgtccagaatgtgtcctaaagtcacaacatttgacttaattgctaaatgtaagaaatcatgattttaaaaaaacaagaatatgttgtagaaatatttagaatccaaggagtcctaaattgtctaatgatataatttctgagaaattaagaattaaattttaacatttctctttgaaaaaccagcattattttacgaaatctgaatttagaagacttggatttgtgtcccagctatgcaaactacctgaggctgtgattccggagaaatgataatcacacaccacataatgataattcgatcaacaacagaccatccgcatatataatggttgttcaaaaagattatcatacctcatttttactgtaccttttctatgttttgatatgtttagatacataaatactttctgtatctattgtgttaaaattgcctacagtattcagtacagtaacatactgtgcaggcatgtaactcgggagcaacgggtcataccatgtagcctaggtgtgtgacaggctatatcacttagatttgtgtaagtgcactctatgatgttcacacaatgatgaaatcacgtaattagacatttctcagaatgtatccctgtcattaagaaacacatgactgtacttagtctcattttctttttcttcaggagatactataatgataatgtctactcaaaactggtaatagcattaaataagatcataaaaaagaattcactcaataaatagtaaagcactataccaataatagcacttgtcccaagtaaaaataaaatactttagaagtgaaatgaaatgcttatagaaagtcaccttcgaaaaacagaatcagaaaatcagaaggaaacttaaaggttatccagttcacacgcttctccccatttccctgccaagcaagggttgttatatagggtcttccattctgacataaataaatacataacttcagtgaggtaatgagaattcaatacctatgaataacaaaagcagataaggaaagatctgaagtcccaactctctactatttacaaacctggttaccttgaggaaattaagtaacctctgtctctctttcagatattgtgaaaatagaatttagagattacatcttggtgctagtttcaaacagttatggtgtgaatcaaatgagaaacagatgtaattgtaaaattatatatacaatcaaaagttgttctcaaggcagattgttgcaatgttaaacaattccagtgattgctttttaaataaaatatttcagcatttaaaaggcaaaataatagcaaaagaagttagtcaaattaaatacctggatctaaaatgtagaatttagcctactacaaaatagacttctccaagttactgtcaaagacaactgtgagaagagaaaaatttcatttcttaatacctaaggaaataaaaaatatattctgaaacaacttctcctataaagcatttcctttcaaggggtaaagacgaaaaaaagattgatgggatcatcaattctatttccttttactcttgctccaatcacttagaatttcatttgttctttggctcaaattttactgacattttctaataatgtaagtgatatacattcattcttcatttatcaggaagatttatgacaagtgaaaaaacgtctattttgaaaactgacttactaatcatttgtattttctagtattaccaccatctaatatctaaatcagaaaagaataatctgtaagtttgtaaaattgcctttggaaaacactaagatcctaactacacattatttacacattatttttaagttttgaaaaatgtatttattttaataaataaatattttgttaaatgtgcttatttttttcttttttaattttatttcaatagtttttgggacacaggtggtttttggttccatggatgggtaacactttagtggtaaattctgagattttagtgcactcatcatccaagtagtgcacaatgtttccagcgtgttgtgttttatccttcactcccctccaaacctccctccaccagtccccacagtccattatatcactctgtatgttttggcatccacatagcttagctcccacttagaagtgagaacgcatggtatttggttttccattccctagtcacttcacttagaataacggcttccagttccatccaagttgccacaaaagacattatttccttctttttatggctgagtagtattccatggtgtatatatataccacattttatttatccactcattggcacttaggttggttccatatccttgcaaatgcaaattgtgctactatacacatgtgtgcatgtgtctttttcatataatgacttcttttccttcgggtagatacccagtagtgggactgacggatctaatgatagatctgcttttagttctttaaggaatctccatactgttttctatagcagttgtgctaagttacagtcccaccagcagcgtaaaagtgttcccttttcaccacattcccaccaacttctattgttttctttttttactttttaattatggccattcttgcaggagtaaagtggtagctcattgtggttttaatttttatttccctgatgattagtgacgttgagcactgtttcacatgtttgttggctgtctgcatatcttcttttgagaaatgtctattcatcccctttgcctactttttgatgggattatttgttttttttcttgcttatttgtttaagttctttgtagattctggatactagccctaatttgcaaatattttctcccactctgtgggttgtctgtttactctgctgattatttcttttgctgtgcagaagctttttggtttaattaggtcccatttatttattttcgtttttgtttaaatgtgcttattttaaaattaaaattaaaattaaaatttattttcaaatttttgtttaaatcgagctttacatcttattcaaagataccagctaatgaattggttgagctcagatttctagtgttaaaacatatttgtgaaatataaagttgtatccctgatcaaataagtatctgtcagttttactaagttataagtagaataaagtgttaatcagcaaattatgattaatcattcttatgatatatccatatatatccaaagtaatatgaactaaataggccattttcatccaggctcattagaacaatttaaatttcatatataatatctaaattagaagagcagttaatatagtgtagtaccaacttagtatttttattgatacataatagttgtatatattttggggatgcatgtaatatttttatatatgcatacaatgtgtaatgactaaatcaggataattggggtatccattacctcaaaggtttatcttttttttgtgttgggaacatcacaattcctctcttctagctattttgaactatacaatattggtaactttagtcagtctactgtactatcaaacactagatcttattccttctaactgtatttttgtattttaatcaaatctcttctcccccccccctttccttcaaagcctcctataaataccaattaactttctacttccatgagatccccttttttttagctcccacatatgagtgagagcatgtgatgtctgtcttcctgtgcctggctcatttcactttacaaaatgatctcatgtccatccatgttgctgcaagtgacaggatttcattcttttttatggttgaataatattctattgtgtatatgtgccacatttactttatctgttcacttgttaataagtaggttgatcccatatcttagctattgggaatagtgctgcaataaactggggaatgcagatatcactttgataccctgatttcctttttttttttggatatgtacccagcaggggcattgtgaaatcatatagtaattctatttttagttttttaaggaacctccatacttgtcgtccattgtcattgtactaatttacattcccatcaatggtgtacctgcattccccttcctctgcatccttgccagtagctattatatttgtcttttcagtaaaaatcgttttaactgaggtgagatgatactgtgattttgatttgcatttccctgatgattagtgaggttaagcattttttcatatgcctgttggtcatttgtaagtcttctttcgagaaatgtctataatcgtttgcccatttttaatgaaattatttggttttttgctattgggttttttagttccttatatgttctggctattaatctgttgctagatagatagtctgcaaatatttttttcccattctgtcagttgttgaagctgggaaaactggataaccatattcagcagaatgaaactagacctctgtgtctcaacaaatacaaaaattcagtgaaaatggattaaatatttacatctaagacctaaaactatgaaactagtaggggaaaacacctcaggacattggtctggacaaataatatttgggtaagacctcaaaaacataggcaacaaatgcaaaaatagacaaatgggattacatcaagcttaaaagcttctacacagtatttctttaaatattatttaggttgagccttatagcttactttaaggtatccacaaaggaacacatcgcctgtgcttggtcaactggcatgaaatattcagtcattgattgatgagcatttgggttggttccacgattttgcagctgtgaattctgctgctataaacatgcgtgttcaagtacatttactaatgtaaccaaatatcacctggaccacaataacttattgaaaaattaatgttaaaaaattcattgggactgtgaaaaaagaaatattaagttacattgctaatcaatatctgtaaaatagcaagcagcaaaataatccctatgtcttaaatgtaaagtagcattttctgatatccagcatttgacaaataacaaatactctaaaatcctaaagcaaatgtggttgacaagaaaatagaaaaaatattttggaaaatggaaatagaaatggaaaaatactttccatttcccaaaaacaaagtaaaacatcaaattaaatttaataatatccaatgtaaatagctgcaatattttgcagctttaagctaatacatgtaagttcagttaaaaacaggaattctagaagtattgacttttgctgctatatttaattcacatccattttctgaaagatataaatacacatctgattaataaaaaatgtatttcggtaagttcagcatatgctctgagcaaaattaaataaattgggaagagtcaaccttcaaatttctttgcctcaacagcaagattccctgtaattaaatcacaaccaaagatgtttatttcataccatcctctcttgcttgttgattgagtccaaagaatttcaaaataaatgcaaatcatcttcatatggatgcagaattaacatctaatgaaactctcaaatttaataaggtccttttgatttcagattttcttgacacttttacttctctttaatgggaataaagttgcagatgtgttcaagatggtcaaaagatttcaggacaatacgtcccattttctaactgaagtttctttacatgttgaattcactctcatagatttctagattacagagtgaataaaggcaaattttaagtagtctgtatccttatccaggaaaaaaagcaagatgactaaagatgtttctagttattcaaagagcaacttcagagaccagattatacaatttttagaggaggtatgcctcttttattagaaaacctaagaaagatcaaatcatacagatagcttattatatggattctagatccaatttgatacgcaatctggattacagataatgagatctagcatgcattaaatactttaaaaggtagaagaatagaaaatatcttatgtgtatataaaacaatatacatatttcagaaatacaataacgatctgctgatatttttcaaaacagcatgcaagtgtcacaatataccaaatatagtttaataacattaaacttaagaagaaaataaggaactatttgttaagtagagaagaaaaattgaattgaaatatgagtatacaggtttaatataacctcacagggaaagataagattattactaaaaataatggatgaaaagaagagaggagaaaagtcagaaagaaggaaaagtaaaggaaaaaggaatgaggggactaaggaaagcagaggagaacaagaaaaaaagggatgagaagaagtgggaggcagggaaggaaggtagagaggaaggcaggtagtcaggccagccaattgcttttcagaggagaattaagggatttgaatttgcagtagaaatacatgtgacaatgaatcctccatattttaaaaagagaaaaagatacaaagaaatagctctctactctatctatggaaataatttataatacttgcagtaaattttgttttattaaccatgattttttcctatcatttgatggtaataattttctaatctgtgattacaaataacccaagaaatcaccagtagagtacattttccattgtgtcctgatctggctaattgaagatgaatatgaaataatgcatttcaggtacaaaatgctgcttcatttgtggattaactagcattgataaacaatggctcccaatgaaaatgtacaaaattggggaaactggtttaattttcagtatgaaggctttagattttatgttgggggtagggggacagtttgtgttcaaagcaaaagaataaactatatgatcccgaaacattactgctggctttatgattctatgaactttagcctaccaattataatgtttatggaaaaaatctagagcagatggatacaacaacagcgacaaacatggaaatgatgtgtttctgtgcagactgctaaggcttgcttgggaagaatacaatataatcattgttagttacctctgctaagtgagaatgcaaataaaagaaataaccttcttctctggctctgagatacagtctatgacattattttctccctcaaatatcttttaagccaatattaaaattagcattccatgtaaacatatgacaaatgattatgggaggcaggccagaaatatataatgtgacagagaagagccagggagagtttaacaacaaaggggagataatgcagagtactggtaaaagcatagacttagaaccagaacacttaagctctagacacaaccccactttaatatctatgtggccattaagtcacttaactaaatgggcattgtttctccatctataaaatgagggagctgaggggtgtcaggtagaaaaagtgatctctaactgtacaagttcatagattatttaaacttgcaaaatcaagaaacatacactctatatgaaattcccaatttcagaactgtagcatcatagtgcataactgagccataaataataccaacacagtgtatcattcaatgttatcattgtaagaaacaatggagaatatcaagccaatctattcaagctattgaactgaggcctacagatgttaagtaaatggttcaaggtcacacaactagcagagatggggagatggggttagaatcttcctgctttttccaatgcctataggatgacactgaaaattaaaaagaaaagataaatgagatctttcagacaaaagcacagacatataattcccacagactatctgtaattaaagggatctttaaaaatagctaatcaaattatctgtttgtgagaatcttaatgattgctattcaatttgcttaaattatctttattttctaaatcaccaaaaaaaaaaaaaattatgccatgggccatagaaaaacatatctcaacagttagaacttcatagactgtcatgtataaatcagcatttactaaatacttcactgaaaatgaaggagggatatgaatgctaatccattttgggacaatattactttaagaagtgcttacctaccaatgccaatctgagaaagaacaagaaaagtagtatgcctcaaatgaaaggtcaggcccaagatatcctgcccattagatgtaatagagtttatcttcccaattagaactaaaaaatatgatagtagcctgaatccataattcagatagccaagaagccatcaggattatattacttgggctgatttgtctttgttcctggtgactcaggtaaaaaaagaataacaacattctcctttaaaatatttagatatctggacatactttccattctataaaggaagagaaaaaattagaagatatggcaaaatatttctaaatgagatgatataagacaatatagaataggaactgaataaaaataaatacaatttgggaattccaattctaaaaatctaaataatgaaacaaagtttataatagtttatgtaactcaaatgattctctaaacaggctgatggcattaaatttatacattttaagagaaaaatgtcagtgatcaataatgacaaaaaaaatgtcttgcattaagagctttatgaccaccaaacctaagattaagtatgaagaagacccttgagtcaccattcacagaataaaagaaatgttaggtgaaaaaacaaaaggtaactaccatttctactttttaaaaaataatttcaacttttattttagattcaggggacacatgtgcaacttttattttagattcaggggatatattgtatgatgctgaggtttgggatacaatttatcccatcaccttgatactgaggatagtacccaatagtttttcaaccctccctaccccctctagtggtctccagtttctatcattgccatctttatgtccacaagtagccagtattaagttcccacttataagtgagaacatgcagtatttgatttgctgttcttccattaattcacttagaataatagcttctagctgcatctgttgttgcaaaggacacaatttcattcttttcatagctgcatagtattccatggtgcatatgtactacattttctttatccaatccaccactgattggcacttcaattgattccatgtctttgctattgtgaatagtgctgcaatgagcatgcaggtgcttgtgtctttttgatagaacaatttactttcttttggatttataccctgtaatgggaatgctgggtagaatggtagttctgttttaagttctttgagaaatctccaaactgctttccacagagactgaactaatttttacattcccaccaacagtgaataagcactctcttcactctataaaagatgccaacatttgtcattttttgactttttaataatagccattctgactggtgtgaaatggtttctctgtggttttgatttgcatttctctgacgattagtgatgttgagcattttttcatacacttgttggccacttgtatatcttcttttaagaagtgtctgttcacgtcttctgagtactttttaatgggattatttggtttttgcttgttgaattctttaaattccttatagattctgaatatttggcctttggtagatgcatagtttatgaatattttctcccattctatagtttgtttattgatagtttctcttgctgtgcagaagtgctttagtttaatgaaattaggtcccacttgtcaattttatctatttatttatttatttttgagacagtcacccaggctggagtgcagtcatgagatctctgctcgctgcaacctctgcctccagggttcaagcgattctcctgcctcagcctcctgagtagctgggattacaggcacatatcatcgtgcccagctaatttttgtaattttagtagagacagggttttgccacattggtcaggctggtctcaaacttctggcctcaagctatccacctgcttcggcctcccaaagtgctgggattacaggcatgagccactgcacctggcctcaatgtttctttctgttgcaattgcttttgaagtctctatcgtgaagtatttgcccagttctatgtccagaatggtgtttccaaggttttcctctaagattcttatagtttgagatcttacatttaaatcttcaatctaccttgagataatttttgtatatggtgaaaggttaaggtccagttccagtcttctgcatatggttatccagctatcctagcactatttattgaagagggagtcctttctccattgcttatttgttatcaattttgttgaataccagatggctataggtgtatggctttatttctgggttctctaacctgtttattggtctatgtgtctgtttttgtaccagtaccatgctgttttagttaatactgtagccttatggaatagtttgaaatctgctatcatgatgcctctggctttgctctttttgcttaggattgctttggctatttgagctctttttttaaattcaaaatgaattttagaatagttttttcctagttctgtgaaaaatgacattagtaatttgataggaatagtacggaatctgtagattgtaactagcacttttaaagcagtaattaccacatctaaaagactaaagtgagggccaggcgtggtagctcacaatcggcactttgggaggccaaggcgggcagatcacgaggtcaggagttgaagaccagcctgatcaacatggtgaaaccccgtctctactaaaaatacaaaaattggccaggcgtggtggtgggcatctgtaatcctagctactcaggaggcagaggcaggagaataacttgaatccaggaggcggaggttgcagtgagccacgattgtgccactgcactccagcctgggcgaaggagtgagactctgtctcaaaaaaaaaaaaaaagtgaaatgaaatgatacagatctgggaaaactaacttggatcattcacacaaagggaaaacagagacgagggggagataaaggaagagggtcattttttttctgtaggggaggacagaacatctgaatcatttggaggactcatcacactttaactctgtcactaaaccattaggatacctagctaaaatactggaaatagagattgttacggctacacactcttgcactctccataacatatactattacattatttgaaacagttttacttattaaaaaaatttagggttggcaaatctaaaactagaaagacaatcatgaatgacaaagataaaacattttagctaaataaggattctgaagtggttcatataagtgaccagggctcagaatagtgggagtcatgctaagtttacactcctagtaaacactcctatgttgggtgaatacaaggagacaccaaaaaaggtaaaggggtgttatcaagtggttttatcccattctctcccccaaagatacacatgactagcatggtcctgtcaatttttccattctcccagtgtgataggttgagtattttagagcatttctttcagcttacactctgcacgcaattatactcagcaacattcctaccaagtctaacttgtcagtgttgtcacctggtccctttccaaattcacctaagcccattggactcacagagacatgagaaaggtatcgtcaagacataattaacttcatcacatgtaactaaatacacacgattccgtccaaataagtggcacttacttatgtccatttaaggctgcgtggtgtaaagcagtgtaacccgaactgtctgtgcagttcacattggggcctcgccagatgctgcaaataaagcacaagcgcagagttaacagtgaagccagatcttgccttgaaaaacaaaaagaaggctggtagccccacagtcagcagcaggttgtagataaaaattttagccatgtggaaaatgattgccatcttctatgaattcccctcagaacatcaacttcatttatttgataaaaggaaactaatagagaatgcaactattaatatcttcagaaattattaacaaatgtgtgtccatggtcgtgcactgaagtttggatccaaaaattccctattactttctatcgttacttaaatattagaagcaactaacattcagctactatattccataccaaagaataaagatttatgagacctgcctcatgcctgttaacacactccttctgaggtgccggtgatttatataagttataagatatttttgcattgtgggaagaatataaagtctttttgctcttcaattgcaaccaggaaaatgtaatcaatatttcatacttgaaaataaaattgaagatttggactgttgtaaaccatgagaagatcctaacaattttgcagtcatcattgattttactatgcaatatattctggagataacatgtaactatataaaagagtctattttttttttgataactacaattaaggaaactctttttaacttttggaaaataaggcactgaaagacacttttccaaaaatagaacaaaaaattgctttatctgatggtcatagtgatatcaaaactatcaaagataaactagttcacacattcacaaaacatttattgtacaccaactgtatgtcacatattgagctaggcactgggagcacaaaatcgtaactcaaggtccttctttacaagaacatagtgtaatggaaaagatagacacacaagctaataattacaaagtggtaagataatcaaggtaccagacagcacacaggcatctctgaaaagagaatgaatagctattccaaacaaggggtcatggcagacttaaactaaggtgggtcaatgaaaatgaatggaatgtgcttatttgacagttaattaaaagaagaattaatgaaacacatggatcaattggaagaaggtgggaaactggaagcagtagtctagagatgactcagactttaggcttacatgactagaaaaaattacaatattaactaagatgtgaaataaaaaaagagcaaaatctgctgcagggaagacaatgcaggatggagagaaaacaatgactcctagtttgcagacgttaaatcttaagtctctgacttacttacattacataggttcaatgcaatccctatcaaaatcccaatggcattctttaggaaattgaaaaaaaattctaaaattcatatgaaaccataaaagaccccaaatagccaaaacaattctgagaaagaaaatcaaagttgtatgccaggctcagtgactcatgcctgtaatcccagcactttgggaggctgaggagggaggttcacttaagctcactagtttgagaccagccttggcaacataacaagactccatgtctgctaaaaataaagaataaaaaaaattagtcaggtgcggtggtgcacacttgtggtcccagctacccaggaggctgaggtagaagggttgcttcagcctgggaggtcgaggctgcagtgaaccataatcatgccactgcactccagcctgggcaacagagcaagaccctgccacccccacaacaaaaaaaagaaagaaagaaaaatggaggcatcacacatccagattccaaattcaggggatatatatacatacaataaaatattattcagccctaaaaaagaattatatctaaacattttctatgacatgaatgacccgggaagacattatgctaagtgaaataagccagacacaaaaagaaaaatattgcctgaaaatatacggaatctgaaaaaaaatcaaatatacagagatagagaacaaaagattggtagggggagtagaacgggggaaataaatatcagaggatacaaagtagcaaatatgtaggatgaacaagtgtagaggtctaaagtacaacatgaagactacaggtaccaaaattgcactgtatacgggatttcagctacgtgagtagattttagctgctcttgccacaaaaacaaaaaataaagggtaactctgtgagaggtggtcatttgtttcactgtagtaaacttttttttactatctatatgtatcccataacatgtgtataccacaaatatacacaataaaatttatttttttaaataccacaatgacatgctactatataactatcagaattgttatctttaaaaaggcttcacaaacctatattgacaaggatgtagatcaaccagaattcacacacacactgctaataggcatgcaaaatagtacaaccacttagtgaaacaatttggcagtttcttaaaaagttatatacaaataccacacataacttaccatcaaatcataccatacaaataacatacaaataccatataatccagtcattccactgtaggtatttagcccagagaaatgaaagcatatgtccataaaaagacttgtacatataatattaataacagctctataggtaatagcctaaaacagagacaacccaaatgtccattagctggtaaacagataaattgtgatatatccatacaatggaaataaaaagaattaaatactcagaaacaaaaggaattaaatactacgacattggttgaaaatctaaatcaattagattttctcaggaagaacagcagaatggctgcccttcaatctccccagcagaaagggagacattctctggcacagataaaatgcatgatctctggactagacccctgattggtagccttcatcaacttctgtgatgtaaatacttcaacttaacgcagtgataggaagagatgctaacaactgcacttcacaagcagacacaagccaatccagcacaccattcaaaggcctacaaccaacaagtcccaacactatgaactcagagcttcccatgagtttttgaaaacctccactctcaaatatgaacaaataaccaaagacatccaatcacttgaggaaagcctttactactaaagaaaccaaaacaaaaaattaggaacaaactacagaaaaaaaagaaacttagagaaaatttagactatgcatggagaagaaattttcaaaaacagttatcattaatatcatctcaatattagaaaagataatgaatgtaagaacaatgaaataaaaaagaaaatcagagataaaatcagtagaagaattaaaaataaagctgataaggccaggcatggtggttctcgcctgtaatcccagcactttgaaaggctgaagtgggcagattacctggtcaacatagtgaaactccatctctaccaaaaatacaaaaattagccaggtgtggtggcgcacgcctgtagtcccagctacttgggagggtgaggcaggagaatcgactgaacccaggaggcggaagttgaagtgagtcaagatcgcaccactgcactgcaacctgggtgacagaatgagactctgtctcaaaaataaaaagtaaaaaataaagctcatgaagtatctcagatacttagaaaaaaaaggcaaagatatagacaaatagaagggaaatcataagaaaagtaggacaccgatttagcagttccaatattgaaaaatagaggttcttaaagtcaaaacacagaaaacaggagaatgaaaacaatgaaagacatcattttaaaaattatcagaactgaaggacattaatttaccaaataaaatgtacatgggccagtcgcggtggctcacgcctgtaatcccagcactttaggagaccaaagtgggtggattacccgagtgaggtcaggagtttgagacaagcctggccgacaaggtgaagccttgtctctactaaaaatacaataattaggccgggcgcggtggctcacacctgtaatctcagcactttgggaggctgagtagggcggatcatgaggtcaggagatcgagaccatcctggctaacatggtgaaaccctgtctctactaaaaatacaaaaaaattagccaggcatggtagcgggtgcctgtagtcccagctactcgggaggctgaggcaggagaatggtgtgaacctgggaggcggagcttgcagtaagccgagatcgcaccactgcactccagactgggcgagagcgagactccgtctcaaaaacaaacaaacaaacaaaaaatacaataattagccaagcgtggtggtgcatgcctgtagtcccaactactcaggaggctgaggcaggagaaatgcttgaacctgggaggcagaggttgcagtgaggcgagatcacgccagtgcactccagcctgggcgacagagtgagattcggtctcaaaaaacaaaaacaaaaacaaaaaaggaccaggatagctttgataaaaaataaaaataaaaaaaagacaaagaaataactgaagtgagtccgatacggtcttttaaatttcaattaaacaaacaaaccaaattcctaaaacacccatccagggctattctcttaatttaaatttttcctctttcaactctagttacactaacaagtcttcactattcaggaaacctagaatgaagagaaattattcatacctattacttctacttcaatctgcaatcttcaattattaatggacactctccaagttctaagtccaagaaaatacaagtccaagaatcaaacaaaataatgaataagatatcatctcttcctccaaagagctgacaatctaatagagaaaaatatatacagataaattacaatataggcagtgaccatagttcctacagcacagaaaacacctaataattgtttgttatcaatcttcttgttcttattaaataaatgctacaatagaaaaatctttaactccctaaattaatacatctgttcaacaaaaatctctatggaatattttacggaaaactcaactaaaagttctaaatttgatttagaagaatttacgggaaaaaaaattgtgaaacaagaagtaataatgggatctacatactaccaattatgaaagcatatcataaaacaataccaaaaaatgttagtctagcaccagaatagagagctcaatgaatataagagaagccctagaaacaaaccagtcatacatataggaataaagctgacatctgaaagaagcaaaaaaaaaaaaaaaggaaaacatcattcaataaatagtcccgagaaatatgttttaattaatgggaaggaaaaaacaatttcaattccctaccccataccatttagcaaaatttaatccacatgatttgttcttgacttctcaaacctcattcctaccctctttttctcacacaccctgttcaaaccacacaggcctccttaaaaatataagtatgcttgcaccttatgactgttgcatttgaaattctctctgcctagaaagttttttcctcaatcatatggctcaatctttctgctcaaatgtcatctcttcggaaactctctccctaattattcagtcaaaaatagcaccctatcatcattctctttcctcttagttatgggacttatcaccatctggcattatattatttatttatatgcttactgtctgtctccccactagaatgaaagctccaccacactatctttgggtcttaaaacagtgactggaatattgtaggtgaccagtaaatatttgttaaatgaaatataaaaatgttgagtacatatatgaaaaatgtcaacctcactggcaatcaaagaaagcaaaaaaaaaaaaaaccaaacccataccattatatatttctttatcaaattgggaaaaaagtcaataatattcagtaatggttagcatgcagagcttataataagctggtggtgaaaatgtaaattggtacaatttttctggaaggcaatttgacattacatgtttaaaagctttcatagtgtgcaaatgtgttacctagaaattctccttaagaggaattattttaagaaattaattaatagtttgtacaaatatttagctataaaaatatttatcacagagtgagggtagtaaaaattatggattttgatatataatgccacttagaatagttattctctctttgctcttgtcagctagatttctaacactgcctgcctccagagcttagtactcatctttctctctagctttcttatatgagacccacagcatcagtgtcttatatggctccagtagcatatggcttgagctcctactgatcagggttttttttttttagcttatgtgaacctccctgggaggagaaagtctaccaacagagtagccagggatcctagagaggacgcaattcttcttagttttatacaatggctcaatatatgtgacagataaacagatatcactattctttaacataaaataaaaatctcacaacaaaatggaaaaacaggatattaacaggcaattcacagaaaaggaaatgtgaatggctaataaatatttgaaaatataattaacctcactgtggctagcaaagagcaaaataaaacagtggctgcctacttttctaccatcagatgggcacaaatttttaaagaaataattgataacaatcaatggaggcaaatatgtgaagaaatagtcactctcacagaatattcattgaagtgtaaattgctacaacattcttggaaagtaacatggcaatacataatcaaatttcaaatatgaatactcttagacccaacaactccacttttcaggattgatatctatgaaataaaaatattcatatgaagactgcagacacaaaaatatacactgtagaattttaatagtataaaagagaaagggtctggaatggtggctcatgcctattatctcagcactttgggtggctgaggcgggcggatcacctgaggtcaggagatcgagaccagcctgtccaacatggtgaaactctgtgtctactaaaaataccaaaaattagccaggggtagcggcgggtgcttgtaatcccagcactttgggaggccggggcaggtggattacttgaggtcaggagttcgaaaccagcctggccaacatggcaaaaaaaacactttactcaaaatacaaaaattagccaggcatggtggtgcatgcctgtaatcccagctactcaggaggctgaggcacaagaatcacttgaacccaggaggcagaggttgcagtgagccgagatcaggccactgtactccagcctggatgacagagagagactccatctttaaaaaaaaaagagagagagagagagagaaagctcataaatgcccagcaaaaaaaaaataaaaaattaattagtccaatagctgagaatggggcaaaaaaggaaaagttaattaggattcattcacactatgaaatgttatgcaactattaaaataaataactttgatctgaatgtattgactttgaaagtcagccaaaacatataaagtgaaaaacgtaaattgcagaatattgtgtgtgtctggagcattccaaatgctttatatgcattagcttatttatagccacacgactataagaaagttactattactattcccattgtatagatgaaaaatatttgcaataacatagaaaaatacatgcaaaaatacattattcattctgtgaatagtctgaatgttgaaattatcatgaatttctttaaggaaaagaaaagacaataaactacaaaggaagaaagataggtttgctccagattacgaagaacctcataatatattgaaaagcttggattttattctgcagcaacttggaactaaatggctttcagaaagataagtatgttcctcacatgatcagtcagtgttttagaataagagctcttgtaacaggtggaaggtaaacagagtgagagtcaggttaattgttttacagaccaggggagaaacaaagcaatttgaacaaatgcagatatagtggtagagagagagagggtgagaaaattcaaattgatatgtctaaaataaaacctatgggagatggtatccatatgaatagaataagaacaagagaatggctgaggtttcaaccatgaacgaaatgcatcaatgatgagatatctccactagaaaaagctgcaagggcagtagtatcttctggcaggagccaagtttcagttaaaactgattagaacactaggttgcttggagtacctcaggcaaaaaatggaaaagaaataggaaaatactgcaaattaactgtcatacattttttaaatttctgcatgttattagaccttacaaatattttgtaagagaagatatttataactaaaataagattcagggcctatagatttcaattacctataccaactcagttccccattatacaaaaattaattataatacacacatttttaataactccattgaatgtcgccttctcctagcaaaatggatatggatacatcttttttaaacaaggaggtttagaatggaaagttagcatatatctaaatatattcaactgcacctattgacagagcctctaggcacatatccacatatccatagaacatccaccgacacatctgaaacaccataaataagccagacccaaaccctccaactaaaaatttaatttaaaaaagaaaccttgatttctaaaaggttctgcttcattccaactttttatattgccttgccccctttactcaggcataatcttcaaatttagaaagagggcctagattaaaaacttgattaacttaagcttgtttcataaaatgcaagagtttctagacacatttaagaaatgtcttgaaaaagtataaaatgcttattacatatttattccaaaaaaagcaatttatagatccttggtcttagtctaatacacacccaaatcccatttcttatgcctacttgtcaatatcttaaattctgtatgtgagaattactgcccaaaatgaatgttctcagacaatatggggttgccaattaccaaaaatttaatttcctttgttatattatttgcactaatgtaacaaatcagattagtagattttagaataaatataaacaaaatagttttctaccaaactttcaaataaccaggacattcattagtcagaatattctattatctaagctttcacatattaaataagattattcttaaaccataagcctgagtttcttaggccaatatccatatgtacagcaaataagatttgaagcacaactactccacaaattgatcattattataccttccatcagtctatggggaaaatctatcagaaataacataaaactgtttcagtttttattgattcctatctgacccctgacacatgagatcacgccgaggcatcagatatggaaattcatacagaatgtgcatttaatgcctcaggcagggtcagagtatgtaggaatggtcttctgacagatcatatcatttcaagcaatgcaaaataaaccttattctcaatctgtgtcttaatagtttacttccatttttggatgaactggacatatgtacatatgctactgattactacaagtgaagttctcatcagtttagtgatggcacaattttattatcatgggctacaagtgtcccacatgggtcaaatgggtctatatcagcactgtcctttagaaatacaaggtgaggactgggcatggtggctcacacctgtaatcgcagcacttttggaggccaagacaggtggatcacttgagcccaggagtttgagatcagcctgggcaacaaggtgaaaccccatctctacaaaaaaaaaaaaaaaaaaacacaaaaagaaaaattagccaggcatggtggcatgcatctgtagtcccagctattcgggaagctgaggtgaggattgcttgagcctaggaggtggaggttgcagtgagctgacactgtgccactgcactccagcctggacaacagagcaagacccagtctcaaaaaataaaaagaaaaaaatatataatgtgagccatatatgtgaatttaaattttctagtagccacattaaaaagatgtgaaattagtttgaatatattttatttaacctagtatatcaaaaacattatttcaacatataatcaatataaaaagtattgagatgtttcacattcttttttgtactgttttcaatattggtgtttattttacacttatagcacatcacaattaggactagccacatttcaaatgcttaatatcctgatgtggacagtggctactatattgcacagcacagggcatttctatataattattccaaggggaaaaaagaaaattaactctaataatatgaaaaagctttctagtataaggaagagtagctaacggatgctggacttaatacctagaagatgggttgatctgtgttacaaaccaccatagcacacgtttacctatgtaacaaaactgcacatcctgcacatgtatcccagaacttaaaatattaataaaagttgatgaaaaataaataataaaaaagtattgtcacattggaacccacatactatcccatatgagtttattgaatgaatatttactgaaatgtgcaaaaccatctaagtaagatagatatacactataaagcttaaaaatgcagagaacaactatgaactggccttctgtgaagaatgagaacaagaatcagcaaactgtagaccatgagccacatccagtccactgtttgtttttgtaaataaagtttcatcgaaacacatacagacacatacacacacacacgcacaaaagctttctaaaaataactgcaaacgttggctttgtagtaaatacatgtctatttgagtcacaaacaatttcttaaagatatcttgcctttggagcaaaaataaataatagatctagtatacagtcatatcctagactgtaatgcacaattttacaaaaagcacatcaggagcatcatagtcaaaatcgtactaactaaacattttctgatgaataatgtgcaccttgaattacttgatgcaattctcaatacatgtatttttaccagcaaatgcgaattgaatgactatgagcaaaagtaactccttgagttataatcacacatataatacaattatgacctctcttcaatatatacagtatgtgccacaagatggaattttagaatatgaaaagaatttgtaaccacaccgagccataaacacagagtcaagagacatgagaggaaaactagagcatctattttaacctagttttaacttcatcacttgttctaaaagtgtaaaacattcctcccagcccatattttctcttctctgcatagatataattcctggaaaataaaccagcagacaaggcagattaatctctcattgtcacacgaacactgattttggtggcaattgtttttcctatcctcacattctcttcataggtaacaataattccagggtactatggtaggaaaaaataatggtacccccaagatgtatacgtcttaatctctggaacgtgtgcatattttgtattacacagcaagggagaattaaggttgcagatagacttacattgctaatcagctggctttatcccggattacccaggtgggccccatgtaattacaagtggagaagagggaaatggaagagtcagaatcaaaaagacggcacagtcaaaaagactcaactggccattgttggctctaaagatggaagagggtcatgaacctagaaacgtaagcagcctctagtagctggaaaaggcaagaaaacagattttcctagagccttcaggaaagaatgcagccctgcccacaccttgattttagcccagtgagaaccacagacctccaggactataggataacagatttgtgttattctaagccactacatttgtggtaacttgctacagcagcaatgggaaactaatacaggtgtgcttattgtaattaacacacccgaaatatgagacgttcagacctttccaaatacttgggaatttaaggtagcatgagaaagagagcatgaacaaaacattgactgcggacttgctacatactagaaactatgcaaaatgctttgtattgattacctaagttaatcttcataacaaccatgtgagacgggggcttttataacccctggatttttaaatgaagaactgaagagcagaaaagtaatttatcaaagatcacacagctagttcacattgcaggcaagatttggaaccaggctgcctgattccagagccaatgacattaaccactacattatacttcagtctcattgtttttatttacctttgattataataaagtggagacatttttacttgtataaatataaggggtccaagtgcagttttgttacagggatacattgcatagtggtgaattctgggcttttagtgtaatcatcacccaaataattacattgtaccttttaagtaacttttaatccctcaccgcccaaccccaaccctcccacctttcctagcctccaatgtctatcattccatcctctatgtccatgtgtacatattatttagctcccatttataagtgagaacatgtggtatttgactttctaagttctttcacttaagataatggcctccagctccatccaagttgccaaagacattatttcattctcttttacagctgtatagtatcccattgtgtatgtgcatatcacattttcttcatccaatcatctgttgatggacacttagattgattccatatctttgctattgtcaatagtgcaataaacatacaagtgcaagtatctttttgctacaattatttattttcatttggatagatacccagtcgtgggattcctggattaaatggtaattctttgagatatttccatgaagttttccaaagaggttatactaacttatattcccaccaatggtgtataagcattcctagaccttttatgtttcatgaccaatttcattttttctatgagtagcttgtttatattctttgcccagtttttgtattgagtttttcattatttttactgattttcatcattcttactgatttgaagaagccattttatatttatagatattaaccctttctaatgttgaaaatatttcccttatttcatctttcagccgaacttatggtgtactttgcctggccataatgtttactaaatcattctatctttctttaaatttattgtttctagccttggtaccattgaaagaaaggtcttcctgattacaagatgataacaatattctctagtatttcttcctatttctttttttgatgaaattttttaatttctctctattatgggtatatgatatgaggtatttcccaatggaataaactaattcaataccactttaaaataattaattgccatctaattaccccagtgaaatgcttcctttctcatatattatttttctgtacctgtatttcaaatctgtattttgactgttttgttacattcatctatcttctccaaagactaatattacattatttaatttctatagctttatagcatattttaatagctaaaaatagatctcttctgatatatatattcttaactgtttttatcatgggtttattcatctgtataatagatggtatagtcagaccaggcacagtagcatgtgcctatagtcccagttcctcagggggctgaggcaggaggatcacttgagcgtaggagtttcagtccagcctgggcaatacagcaatacctcatctttaaaataaaaaataataagtatagtcaaattgtcaaatttaaaaaaaagttttggctgtaattgcattaaacttatagaaaaagtaggaagaaatgagatctttgcaattctgtatttttccagctgaatctgatttccatctctacagctttggtaacagtcttaggcaaggtacttcacttcattagacctgagtttccccataggtaaaacccaaggataatcacagtaataacctcactgtattgtgagaagattaaagaaaaaatataagtattaaatatactacgcaatccacagaaggtacttattaaatgttatttaattggtctaacctttttatattttctttatagaactcttaaaaatattttaaaattattttctttaacatacttacatagtgaatactatgtgccagatatcattctaaatgttttctaaatattaactcaataaatcctcatagcaacgctatcaaatgagtactataattactacacttttcagattaaataactaaggtacagagtagtgaagtaccttggttcaggtcacatggcccctaccaggtgaagcagggattcaaaccacagcatgcctttaatcattatctattgccttgttattttaattcctaagtaatttagttctttattactattccacatgaagtcttatttttcatgtcttttaattactgctgctagttagaacactgtgtttttcaaattcattcactcattcaaaaaatagctattgagtatccactatatacaggcactgttctcattgttctagtcactgacaacacagcagttggagaaggctgtacagaaaaaagacaaaaattcctgccctcatggtctttacattctgatttagttagacaaacaatatacaaatgaatatataaatatatgaagcaagaagtggtatcaagaaaggcaagaggaacagagtgctgttttatgcagcatagtcgaggaagcctctgggataatagggcaactttggaagaacattttaggaagaaatgggcttaatgctgaggaacagccaggacagcagtgtggctggaatagggtaagcaaggaagagagcacagaaaagtgggtcagagatgtgtggctggatcatatagagccttgtggccattctgactttggccttgactgatatggaaagccatcggagagttttgaatggagaaatgacatgatctgacttgtattctgctgctctgctaagaatagtctgaaggggaaagggtagaagcaaggagatcagttaggaaattactatagtaatgcaggaaaagatgatgacggcttagagcaaaggggtagcatcatgtagagggaaaaaatgcttggattatgcatttaaaggtaaaggaaacagaatttgctgacaaattgtgacgtgcaaagaaaagaaacaggaaggactgcgagatttctgtcatgagcaactagaaaattggaattgccatttattaatttggataagtttgcagaagaggttctctattatttttaggtataataatcatgtatctcttcctttataatattcattccattttttctccttacacaaactgcattggctagaaccactaaaataataagaagataatctttgtcttgttgatgaatttaacggcatgcctggtagggcaccaccatttagtatgatgcttgctactggattctcatggataccttttcagcatattaaggaaacttttattccctcagtaaagaacaaaaaggtggaatagcataatggataaaagcacggactcaggattcaaactgtctggactaaaatgctgatcccctccctaactgcaccaccttgggaaaattacctaactactccgtgcctcagttctctcatctataaaatgaatataccagtaatagctagctcatagggttactgtaaagattaaattagatgtaaagtgctagcacaatgcctgacacataataatcatcctttctgtaggaaaagtttttatctagaatggctcttgtggtttgttaaatttatttaggatatctttcacgatggtcatacagcttttcccttttaatacattaacatatttaatgtcggatgagaagcatctctacactactggaagtaaatttatctacttatggtgtatttttttaatataatcctgaatttgatttgctctttgtaacaggattttgcattcacattcacatgtaaattgtctctggttttcttgtcttttttatttcagttttggaagcaggttacataaactgaagagtttggggccttttttctagtttccagaataattcaaccaacatagaaattgattatgttaattgaatatttgaaagagcaaatgtaaaatcatctaggattggcacttttgtggagtaaacccttaataaaattccagtgtcttctatggttactgacttactaatatagtcgactttttcttacattaattctgtcatttacatttctctaggaaataagttctttccatttaggctttctaatttattgactagaaatcatacatatttttaaatcggttgttattgtccatatttacagttctatcaccattgtaattcccagtgttctgtattatttttctctccttggttagtctaggtggggctagtttatcagcatattcagagatttagttagctttatttttatcaaatgtctattggatatgttatttattcattgtttatttactttttaattaactactctctgttcttaactataagaattcagttacctatttcacatttgagttgaatgcttcactcatttaattttattctttcttattcaaaggtaaaagcattataggctgtgacatttctacggaggttttgcccacatgacttaggttttgacgagttatttttcatttcaattattatatacacagcctgtaattcagtttttgtgtcctttttactctgaaaattatagttgttttttaaatttatcaatgcttagaatcattatatgtcttgctctatttctagtgttaccacattatagtcagaaaagaattcttcaacttctaataatttatttagaatttttttgaaaactagtatgtagtttttgttatgttacatgtgacaaaagttctttgattaaccaaattttagctggcctcctaaaacttctcctaggcccatctgtgtacttccttgtaaaatagcaagagctctgctcagtcagtttagcaagaacctccacccttgagatcttatcagattcctcatcctccaccatccctcaggtgatacctggtcaccatggcctgtcttcagctagacttttcgaagttggtttagccaaaaaccctcttacccatgtttcctcttggtaattttccatccactgacccctgccctgttccccggctatgaatttccacttgcccatgctatatttggcactgaccccaatctctctcccccactgcaaaatcccattgcagtggtccctatacctgtgatagtcctgaatattgtcttccttaccttgctttaacaagcatcattgaataatttttgttaatgcatgagcattgaaaagtatattctattttttagggagagatgtgtacttttcaagcttattaattgcataattcaaaccatcaataactatttagttcgtctacttcattcgcaaatttttggaaatgttaccatacacagtatatcactgtgattgaattattaccaaattttctttgtatttctaagtttgcttcatgtgttttgttgctgtagtttcttcagtttgtttgtttgtattaaggcttttttccaacttttaggttcaagggtagatatgcataacgtgcaggcttgttacacagggaaatgtgttcctacatcatttctgtcatttatgtttttctaggagataagttatttccatttaggttttctaatttgttgactagaaatcacacatatttttaaatctgttgttatcttctatatttacagctctattaccattgtaattcctaatgttctgtattatttttctctccttggttagcctaggtggggctagctgcacagatcatcccatcacctggctattaagcccagcatccattagctattcttcttgatgctctccctcctctcacccccaaccctccaacaggccctgtatgtgctgtccactccgtgtgtccatgggttctcatcatttgcctcccacttataagtgagaacatgtggtatttgattttctattcctgcattagtttgctgaggataatggcttccagatccatccatgtccctgcaaaggacatgatttttttcctttttatggctgcatagtattccacagtgtatatgtaccatattttctttatctagtctatcattgatgggcatttaggttgattccatgtctttgttttgtgaatgatgctgcaatgaacatacatgtgcatgtatctttataacagaataatatatattcctttaggtatatacccagtaataggattgctgggttgaatggtatttctgtctctaggtctttgagaaatcgccacactgtcttccacaatgttgaactaatttacacccccaccagcagtgtaaaagcattcctttttctccacaacctcgcatctgttgttttttaactttttaataacagtcattcttactggtgtgagatggtatctcatgtcgtttagatttgcatttctctaatgataggtgatgttgagctttttaaaagtttcttggccacatgtatgtcttattttgaaaagtgtctgttcatgtcctttgcccacttcttaatggggttgtttttttcttgtaaatttgttttaagttccttttagatgctggatattaggtgtttgtcagagagtagattgcaagaattttctcccattttgaaggttgtctgttcactctgatgatagtttcttttgctgtgcagaagctgtttaactcgatcctatttgtcaatttttgcttttgtggctattgcttttggaattttcatcatgaagtctttgtccatgcctatgtcctgaatgatattgcctaggttttcttccagggtttttctagttttaggctctacatttaagtctttaatatatcttgagttgatttttgtataaagtataaggaaggggtccagtttcaattttctgcatatagctagccagttctcccagcaccatttattaaatagggaatccttcccccattgcttttgtcaagtctgtcaaagaccagatggttgtaggtgtatgatgttatttctgggttctctattctgttccattggcctgtgtgtctgttttggtaccagtaccatgctgttttggttactatagtcttatagtacagtttgatgtcaggtagcatgatgcctccagctttgttctttttgcttaggattctctttgctatttgggctcttttttggttccttgtgaattttaaaatagttttttctaattctatgaagaatgtcaatggtagtttaataggaatggcattgaatctataaactgctttgggcagtatggccattttcatattaattcttcctttccatgagcatgaaatgtttttccatttgtttgtgtcatctctggtttctttgagcaggggtttgtagttctttttaaagaggtccttcacttcccttgttagctgtattcctaggtattttattctttttgtggcaattgtgaatgtgagttcattcataatttggctctcggcttgcctcttattgctgtataggaatgctaactatttttgcacaatgattttgcatcctgagactgctgaagttacttatcagcttaagaagcttttgggctgagatgtggggttttctacatataggatcacgttatctgcaaacaaagatagattgacttcctctcttcctatttgaatacctttatttctttcttttgccggattgccctggccagaacttccaatacttgaataggagtggtgagagagagcatctttgtcttgtgctggtttccaaggggaattcttccagcttttgctcactcagtataatattggctgtgggtttgtcttatatggctcttattattttgaggtatgttctttcaatacctagtttactgagagtttgtaatatgaagggatgctgaattttagcaaaggccttttctacatctattgagataatcatgtggtttctttacttctgattatgtaatgacttagtttattgatgtgtttatgttgaaccagccttgcatcccagggatgaagctgagttgatcgtggtagataagctttttgatgtgctgctggattcagttttctggtaatttgttgagaatttttgcagtgatgctcatcaaggatattggcctgaagttttctttttttgttgtatctctgccaggttttggtatcacaatgttgctggcctcatagaacgaggtagggaggagtacttccttttcgatttttttggaatagtttcaataggaataacaccaactcttctttgtatctctggtagaattcagatgtgaaactgtgtggtcctgggttttggttggtggctatttattactgcctcaatttcagaacaatattggtctctttaagtttttcagttaagcaaaagaatggcacatcatctttatgaattaaatgttttattattattttaaaaaattgactttgttccatatattgctctttaccttgaattatgccttgttattaatattactacatctgctctccttttgtttaacttaactagtagagttttgcctatccatttattttccttctatttctgtcattttatcttggctttatctcttgaaaatggcctatagctacagtttgcttttttgttttataatctgagcagctttgccttttaattcactaacatttgttattattcctgctgctaaattgtatgtaatgtttttattctcctttcctattcttttccctcctcttctctcttctctgttttcttgatcaagcgttcttcatttctttattcctttctagctatttttccttaacattttattcctaatagtcctttactttttgcaaatatattaaacctacatttcttactgacatcaataattacattgtaactatgtccatctttaacaaaacataacttgcatcttttcccacttttaacccaaggatttttgataaaacaaggtagaattttaatgctatagtgttactatttcctcttttatttcagaaatactttaataattatgttgtatttgacaaccatgttttcaatagcgacttaggtttactaatttcattgctcaccatagtttcttgaatatttaaaaagattatatgagatactgtgatattttgctgccttcaggttaccaaaaggcacagaatttacaaacatagtgccatgaccactaaagtcctatatactggaatatgattcatccaccccagagttgcaagcagtctttaggagatataaagatatgagaaatcttttgagagatatgaaaaaaggattagaactatgatgtggtcacattttgcggaatgcagtctttgtgtagacaggttatctgttctcctcccctcccataggtgtagaagaaaaaaacactcaactgggtttccttcccaaagttcacagaaagaagaaccaagaaaaacttgaagtgtgttgctgggcctcagaaagcaacaccctaaattatgatgttttggcacgctaagtactttgaactgaaggacagtggcagggcctcagaagcaaggtctctctcttttttctttcttttttttttttctttgagacagggtctcatcatgtcacccagtacacagtgcaatggcaatcatggctcactgcattctcaaactcctaggttcaaatgatcctcccacctcatcctcctgagtagctgggacaacaggtgcatgccaccatacttggttggaaatccttctgtccttctgagcttctttctcctgctcccctttcttccccaaggcaggccataaaaaatagaattcctcttccccaaggcaagtcatataaactagaaatattactctaaccttctccgacctttctgtgtacaacctggccatcaagaaattctctaacctactgtctgatagtaggtcataagaccctcattctagaaggagtcctgccctacacccagaaggaacaaatgcctcacagagaggtcaagaagaacctcaactgacaggccttgctgggtttccccactcagtctattaccattaagtcattccctttttgtctaatcacattcctatgtggccgtccattctcatcaaacctaaaaataaaaatgaacagttttcccttgggtctttacttctgaatgctcctgtgacatataaaactttgattaaataaatctgttattcttttttcttgttaacctatctttagttgtaggagtgttgaccctgacccttaagatgggttaggaaaggtatcacacccttctgcccctacagttgctgcatgaaggaataaccgacaaattcagtccatggttgaactttccctttgcttgacctaccccaaagcttaaggcagagtgggagtagaggaagagggacagggaaacattagactgaaatgacaaattgttcctggtgaaaaagaacagtttctagaatgtatggaacatgggtcctgcccagacccagggaagcctgaattggggcagcaaatggtgaatgagactgagagccacagtctggccatcaatcagtgcagcaggaggtaaacaagcaggagaggaagagagcctgaggctgactgcatggtgtgatagcatctatttgtgggaggctattgacaaacctgctttggagtaatgctgaagagaaaagggtcaaaaatactgtgggcagtcacagtgtatgaggcatcagttttcagtttcctccttgtccctcctccctgcaaagtggaagaatgggggccagggacagagggaacaggaaggggaggaaatagagagaaagaacagaccatgtattccctaccattctctaccataccaagttgcttttgcaaagagaaaaagcattaaatgaaatatgagatgaagttttcaagtggacaggaccaacaaagctggaagacttaaagtaccatatatcacgataatgtaaaagaacaactggcacagggatacataaatagatctatggaactgaatagaacccagaaacagaccctaatctatatagtcccttgatttatgacaaggatgacatggaagtgaggcacttcttattaaatgacgctgagtcaatttcatatctatatacaagaaatgaatctcaacccataccctgagccatatataaaaataaattctagacagattacaagcctaaatattaaagggcaaaacaataaaatttctagaagaaaaaaatttaaaggcacacagcccaataaaaaatgagcaacgtcaatggtggattgcatttaaaaaaaaaatgtggtacaatacaccatggaatactacacagccataaaaagaacaaaatcatgtcctttgcaacaatttggatgcagctggaagccactatcataagcaaactaacacagaaacagaaaaccaaataacacatgttctcacttgtaagtggagctaaacactgggtatacatgcacataaagatgggaataatagatactgggaaataaagagggggaaaggatgaagtgagacaagggttgacaaactacctattaggtgctatgctcactacctggatgatggattcattcatatcccaaacctcagaatcatgcaatatatctgcatatgtattccctgaatctaaaataacagttgaaaaaaacaaataagcaaatatttggacagatatttcaaaaagaatattcaaataccaaatatatatatgtgtgtgtgtatacatatatgtatatacacatatacacatagttgttcaacttccttagttgtcaggaaaaatgcaaattactatcacagtgagacaccactacatatccaccagaatgactgaaatcaaagacagatgaaaccaaatgttgctggggatatgaattctcataccctgctagtaaaatataaattggtgcaaacactggaaagttacttagtagtacttattaaaccttcaaatttgcatactctgtgaccagcaattcagaaattcttacctatgttcactaaaaaacatgtacaagcatgtacagcactgttcataatagtgcaaaactgtccatcaatagtagaaagaataaactgtagtacattcacaaagaatactacacagcaatgaaaagcaacaaaactattattactctccacacaaaaatgtgtcttacaaacataaaattgaacaaaagaagtcatatagaaaataacacatactgaatgattccatctgaacaagttgaaaaacgaaaacaggacagtaattacccttctgggggatagtaactagaacagggcacaactggggtttctgagatgctagcaatattctatttcttaatttggattctggatacatagatgtaatgacttcgtgaaaatacattgtgctgtaaacttatgatttacatacctctctgtgggtttatttaaacaaaatgacaaaaactaagtcttaatagctggaatgtgactgttttaataacagaaagtgaaaaattatagaattggatttagatgtcattagggagcatgttattcagcaggaatggagatttcattagataacagtggtaacagaaattggaaaaatacaattgttttatgtttattccttatgatctaagaattttcagtcatttcagttatattaatctttccttttcttgaaattgatgtgattcaaaacatgttatcccaaaatatggtatcttcgcatttgagaaaacagcagaagcaagaaagtctctctctctctctctctctctctctctctctctctcacctactctcccctttcttccctgaagcaggccacaaagcctagctgaccttatttattatttagttattagttatttatttttataaactcttttctcttaaatttaatctcttagtaacttgaaacttccatcctcttgctatagccttcattttatacatacagcttcaaagtaacccaaattctctatcttctaaaccaatttccaatgcacaaaacacatcaataattctaggtttctacaaatatatgatagctatttttgtcttccatttttatccctacaaactagttagatgcattttataatcccaagcagaaataccccaattatgttaagtgactcaagggatagagttaattttgtatgaaaagattaaatttgcttgattgctcttttttagtgaagactatgttaatgtcaagtttaagagtgatagtattttgcttttgacaaagacataagggaaaattcttctcagctagttcagtatactctaaatcagccacaaatataaatcctaactcaagtttctcacaactagaagaaatcagaagaatatgataaaaatcaaagaattcatatcatgaaaatgaaaggtacaagagaaattcaataacatgctcttcctattttttgtttgacttaccataaaaatctgcactaatgggggacatctatgttttcaattctaagcataagttttagatctccataacatgaaaatgaccacagattctgaatgagtagctgctctccaccaccatatttccaagctctagaaactcagtgctagagctaaactgagttgttgctattgttttatttagaccacttgaaaccctgaaaatcatcaaaatgcagaaaatcactatgttggttaggtttcctgtggcaggaatatttaaaacaatttaagaaaactcctaaccagaacatgttcagagaattattaacatttttattcagaagtttagatgccattttctgcctcatactccctcattccctccagttcaactcttcctaattaagttttctggccttgccctacccccacctgatcatcatgataaaactaggacataagtattaatacttattaaagcattacaagtattaatatgtctactgttccatttcatggatctactcctactaatgaaggaggagatactaaaaatctaaataagaaattgcttttaaccttgaaaatttagaacattacattatgatatccttgaggttatttgaggaaaaatattatttagtaaactggaaggagtgaaattttttttctaaaggtgtcacaaagaagcaagtaatattggtaataacaattttaataatgtactatctcttataatgaaagatgatgttggtaacccagacaagctaatgggcatatgtttcacactggggtaatacttcactaccagtcacaggaacaaaaagccttttgcaaaactatgtgacaaaattaactatgcagtatgtatcaaagaatactgtggtggttttcaaactatgctattcagaacccttcagagatttagggtaaagcagagtcacattttgaggtgttctgcttcattcggattgatatcttcattcatttatgcatacaataaatacttattaagctatctattacatgcatgcctgtggttgactagcactttctggtatcacacctgtaatatgatagaaacagtccctgctctcagaaagctcagtctagctaaaaataaacacatcaagcaaataatggtagaagtaattaattaatggtcaaaggtacaaacacaatagaaacatgtatagagtgctataaaagaagtctttggtaagtttccttcaccttacgggttttctcataagattttagctgaataaagggtacatgcttccaagtgaccaaaataatgtaagctaacctgacacttatggtattaattaccaaatctaagctctgatgccctattttattgtgtcactttgattcaaaagaaccatacattcaaacgttaaggtatcttaagaatctctgtataccagatactatgttagaagctttagggctataaatatgcattcacttaagaaaatatttcaaaatattggattgaatatttactatgctaggcactggggattaacatttccatgtaataattagtttccagcatttctcagaaaatgtatgtttttccaaatcccaagaaaaatcagtcaagaaatagagaaaaacaggagaaaaaatggcggataggaggtaggactaacttgcagctcccactcggatgtacagagcagcatgtggagactcacactgtgaacttttgctccaagaactaccataggaacatatcaggaaagccaagagaatgcacagaccctttgaagaaggtggattggcaccgcaggctgtgtgggacagcagaggaactgtaagtctactcgctttctcagctgggaggcttgtagcctgaggcaagttctccactctgctcaacggctgcctgaaaataaactcggttctattgggagggcacagtgtgagtgagactggcctttcaggctgtgagttgcgggggagctgggtgaggcctgtggctgccagctttcctccacttccctggcaacctgtgtgagcagcagaggcagccataatccccctgggaacataactccattggcctgggaaccaaactcctttcccccatagcagccacagcaagccacgcacaaggagtctgagctcatacacgcctatatctgccccaacctggtggtgtttctctacccacactggtagctaaaaaaaaggacaatctcttaggagcgctatggccccacccactcccagaccctagggcaagcttgtatcctacctatactactggagctgatgcgctcttgaaagtgccacctcctggtttttggagggcaaccaacacaaaaccagggcacttaaaaatacaaccaaggacccccatagagtccgctttgctcccctgctacacccacaagagcaggtgctggtattcacagctgagagacttgaaaacagatcacatcacaggactcttcgtagacactccccagtaccagcccagagcctggtagctctgctaggagactagattcagaagagaaataaccctcactgcagtttggctctcaggaatccccatcactaggggaagggggagagcaccacatcaagggagcaccctgtggtacaaaaaaatctgaacagcagccccttagtgtcccagatcctccctctgacgtagcttacccagaaaaacaatcctggtaatatggcaaaacaaagttctttaacacccccaaaagttcacactagctcaccagcaatggatccaaaccaagaagaaatctctgaattgtcagaaaaagaattcagaaggtcaattattaaggtaattaaggaggcaccagagaaaggtgatgtccaactaaaagaaataaaaaaaagatacaggatatgaatggaaaaatctccaatgaaataaatagcataaataaaaaacagtcaaaaacttctgaaaatgaaggacacgcttagagaaatgcaaaatgcaccggaaagaatcagcaacagaattgaacaagtagaaaaaaaaaacttcagagctcaaagacaagttttttgtttgtttgttttgttttgttttgttttgagacggagtctcgctctgtcgcccaggatggtgtgcagtggtgcgatctcggctcatgtgcaagctccgcctcctgggttcacgccattctcctgcctcagcctcccgagtagctgggactacaggtgcccaccaccgcgcccagctaatttttttgtatctttagtagagacggggtttcactgtgttagccaggatggcctcgatctcctgacctcatgatccacccatctcggcctcccaaagtgctgggattacaggtgggagccaccactcccggccaagacaaggtttttgaattaacccaatccaacaaagacagagagaaaagaatttttaaaaaggaacaaagcctccaataattttgggattatgttaaccaaacctacgaataattggtgttcccaaggaagaagagaaatctaaaagtttggaaaacatattagatagaaaaattgagaaaaatttccccagcctttctagagatctagacatctaaatacaggaagctcaaagaacacctgggaaattcatcgcaaaaagatcatcacgtaggtacacagtcctcagtttatctaaagtcaagacaaagaaaagaatcttaagagctgtgaggcaaaagcatcaggtaatctataaaggaaaacctatcagattaacatagatttctcagcagaaaccctataagctagaagagactggggttctatctttagcctccttaatcaaaacaattaacagccaagaattttgcatccagcaaaagtaagcttcataaatgaaggaaagatacagtctctttcagaaaaacaaacactgagagaattcaccactaccaagccagcactaaaagaagtgctaaaaggagctctaaatcttgaaacaaatcctctaaatacaccaaaatagaatctccttaaagcataaatctcacagaacctataaaacaataatacaattgaaaaaaaaacccaggtattcaggcaacaaatagcatgatgaataaaatagtacctcacatctcgatactaacattgaatgtaagtggcctaaatgttccacttaaaagatacagaattgcagaatggataagaattcaacaataaagtatctgctgtcttcaagagactcacctgacacataaggactcacataaacttaaggtgaaggggtagaaaaagatattccatgccaatggacaccaaaagtgaacaggagtaactaatatatattcttatattcaatatatattcttatattgcaacagcagtttaaaaacacaaaaagggacattatatattgataaaagaactagtccaacaggaaaacatcacaatcctaaatatatatgcacctaacactggagatcccaaatttatgaaaccattactactagacctaagaaatgagatagacagcaagtcaataacagtgggaaacttcaacactccactgacagcactagacaaaccattaagacaaaaagtcaacaaataaacaatggccttaaactataccctaaaacaaacggacttaacagatatttacagaacattctatgcaacaactgcaaaatatacattctattcatcagcacatggaacattctccaagataggccatatgatagaccacaaaacaagtctcaacaaatttaagaaaactgaaattatagcaagtactctctcaaaccacagtgaaataaaatggaaaatcaactccaaaaggaaccctcaaaaccatggaaatacatggaaattaaataacctgctcctgaatgatcattgtgtcaacaatgaaatcaagatggaaatttaacagttctttgaactgaatgataacagtgacacaacctatcaaaacctctgggatacagcaaaggcagtgctaagaggaaagttcatagcattaaatacctacatcaaaaagtctaaaggagcacaaatagacaatctaaggtcataccttaaggagctagagaaacaagaagcaaccaaaccaaacccagcagaagaaaggaaataaccaaggtcagagcagaactaaatgaaatggaaacaaaacaaaataaaaaatacaaaagataaatgagacaaaaagctggttctttgaaaagataaataaaattaatagaccattagcaagattaatcaagaagagagaagatccaaataagctaagttagaaatgaaatgggagatattacaactgataccacagaaatacaaaagatcatccaaggctactatgaacacctttatgcacataacatagaaaacctagtggacatggataaattcctggaaatatacagccctcctacattaaaccaagaagtagaaactctgaagagaccaataacaagcagtgagattgaaatgctaatttaaaagttaccaaaaaaaaagtccaggaccaatcagacatttaaagaattggtaccaatactactgacattattccaaaagagagaaaaagagggaatcctccataaatcattctatgaagccactatcaccctaacaccaaaaccagaaaaggaagtaacaaaaaaagaaaactacagaccaataaccctgatgaacacggacacaaaaatctgtaacaaaatactagcaaaccaaatccaaaagcatatcaaaaagataatccaccacaatcaagtgggtttcatacgagggatgcggggacggtttaacatatacaagtaaagaaatgtgacacaacacataaacagaattaaaaacaaaaatcacatgatcatctcaatagacacagaaaaagcatttgacaaattccaacatcactttatgactgaaaccctcaacaaaattggcgtaaaagggacataccttaaagtaatgaaagccatctattacaaacccacagccaacattatactgaacaggaaaatgttgaaagcattactgctaagaactggaacatgacaaggatgcccactctcaacacttctattcaacatagtattggaagtcctagccagagcaatcaaacaagagaaagaaataaaggggatccaaattggtaaagaggaagtcaaactgtcactgtttgctgaagacatgattgtatacctagaaaaccttaagactaatctagaaagctcctagaactggtaaatgaattcagcaaagtttctggatacaaaattaatgtacacaaatcagtagccctgctatacatcaacagtttccaagctgagaatcaaatcaagaactcaagcccttttacaatagctgcaaaaaaaataaaataaaatatttaggaatatatctaaccaaggaggtgaaagacttctacaaggaaaactacaaaacactgctgaaagaaatcatagacaacacaaacaaatggaaacatatcccatggtcatggatgggtagaatcaatattgtgaaaatgaccatacggccaatagcaatctacaaattcagtacaattcccatcaaaataccaccatcattcttcacagaactaaaagaaaatcctaaaattaacgtggaaccaaaaaagagcccacataaccaaagcaggactaagcaaaaagaacatacctggaggcatcacattacccaacctcaaactatactaaaaggcaatagtcaccaaaacaacatagtactggtataaaaataggtatataagccaatggaacagaatagagaacccagaaatacacccaaatacttacagccaactgatcttcaacaaatcaaaccaaaacataaataggagaaaagacaccttattcaacaaatggtgccgggataattgactagccacatgtaggagaatgaaactggatccttgtctctcaccttacacaaaaataagctcaagatggatcaaagacttatatctaacatctgaaaccataaaaattctagaagacacattggaaaaacccttctagacatcagcttaggcaaagctttcatgaccaagaacccaaaagcaaacacaacaaaacaaagacaaatagatgggacttaattaaaccaaaaagcttctgcacagcaaaaaagataatcatcagagaaaagtgacaacccacagagtgggagacaatcttcacaatctatacatccaacaaaggaccaatatccaaaatttacaaggaactcaagcaaatcagcaagaaaaaaacaaataatcccatcaaaaagtgggctaaggacataaacagacaattctcaaaagaagatatacaaatggccaacaaacatacaaaaaaatgctcaacatcactaatgaccagagaaatgcaaatcaataccaccttactcctgcaagaatggccataatcaaaaaatcaaaaaaataatagatggtggtgtggatgtggtaaaaatggaacacttttacactgttggtgggaatgtaaactagtacaagcactatggaaaacagtatggagattccttgaagaactaaaagtagctccaccatttgatccaggagtccaactcctgggtatctacccagagaaaaagaagtcattatacgaaaaagatacttgcacactgatgtttatagcagcacaatttgcagttgcaaaaatatagaattagctcaaatgcccatcagtcaacaagtggataaagaaaatgtggtaaatatatataccacggaatactactcagcaataaaagggaacaaaataatggcattcacagcaacctgaatggagttggagaccattattttaagtgaagtaactcaggaatgaaaaaccagacactatatgttctcattcataagtgggagctaagctatgaggaaacaaaggcctaagaatgatacaatggactttgggaactcggggaaagagggggcgggtgagggatataagactacacactgggtacagcgtacactcctccagtggtgggtgcgccaaaatctcagaaatctccactgaagaacttattcatgcacataaataaataaataataaaagaaatagggaaaaccagaaccagtaaaagtactataattctcttgtgaggattgaagcttaataacatggagacattactggttcaaaggaatatactgatgtaaagttgaaagcaagagcagataatattgacacatggagtagaacactgaagttccagtaaccaaggaaggtgaacataggagagaagttgtcacatttaatcagttagtcttattgtggctgttgcagagttatatgtgagtattcatggcattgcatgctgctaacagtgaagaactcttgcaagtaaaataaacattaacaagtttacacgcataatatactttatgcaaatccactgagtggtgttccaagaaatgacaagttttggaagcaaagtaagcccttacattgacaagtttgacatataattctttgaggtactgttagctttgctaggagatctgaatgttatgtaattcaaatactacccaatcacttttgactggtgttttctagtgtctgaatattcactacaggctacagttctctataactattattaaacttcatatttctcatatattaaacaaaatgttagatatttaaaataatgagcaaagcatataaaaactgttgaaagttttttgttttgtttttgtttttttttttgagacagagtcttgctctgtcacccaggctggagtgcagtggcacaatctcggctcactgcaacctctgcctcccaggttcaagcgattctcctgcctcagcctcctgagtagctgggattagaggtacctgccaccacgcctggctaatttttatatgttttagtagatacagggtttcatcatgttggccaggctggtcttgaactcctgacctcagatgaactgcctaccttggcctcccaaagtgctgggattacaggcatgggccaccgcgcccggccgaaagtatttttaaaacaacttacaatttcaggaattcccagaaattctcaagaattactacttctcatttctgaatcccaaagattaatatttattgggaattgggaaatactacttgagataaaagttgactaagagaacttccctgcctctttgaagtttaggagagagatgaaaacatggaaaccaaaaaaagtattaaaggtgttaagataaaattctatttaggacacagtgaagacacaaaggcaaaagacacagagcaattatgcccacagaggtctggagaaggctttacagcaaagaacatgagatcttgagtggtgtcctaaaaggcaaaaactaccttctagataaaataaagggagatatgagactgctaacaggccatacagagggaagactgctgaggctggggtcatgaaacatcatgggttgttcagcaaacatttagtagtttagggaggaaggtggagtttgatgggagacaggaagaacagaaagggatttaattcagggaagatcttctaatgaaaggaaaagtctcccaagaatcttaagtagttgactgacatgatcagatttatattttttagaaagatccctctggaggacacatggaggatgggttcaaagtgtgtgagactagagattagtactgcaacagttaggtgcatccctaaacaatacaactccatacattgttaaagacccacacatacccaacacactgcagggtagaaacctgtaagaggaattgggaatgaaagtgaatactaagtctaatgggtaaaataacaagattttaaaacagagagtaaggcagtcatgatgcttgttgattgtatcatgaactgaagagtataataaactcaagccactgtagctgaggtacctaggaacaaacaaatgaaaggatggctatatctttcctactgataaattaaactacatttgccccaaggctgcctccatactttgagtcctatgtaaagaactacaacccaaattagtacataaactcaggaaaagctaattagaagtatacttttgtaacaaatatctgagtctcagccaatcacagcagctgagctttagtctatcacaagcagccaactgatcagaccatgttcaaataaggcaaatgcctagctaaaataaatcaggctgttcctgtacctcgcttctgtgttctgtccataaatgcagcttgcccaggtctcagagcagaaccctctgaacctcttctggttctgagggctgcacaattataatgcaaatcattctttgctcaaattaactgttaaatgtaatttgtctaaagtttttcttttaacactattcttttcatataatcacatgaaataagagaagaaaatcaatggtagaaaaattcccttgtacagtaaatcaaattgttaagaagtgtaatttctttaaaaagatatatctagttactctatcactgactctcaaataatctgtagaactttattcattttctaaagagtcttgttaccctcatgatccgtatcaacctgcaattcaaaatatcatagaattgatagaattgttttgtctatcagtaattgtcttcatggttatatttttttcagattatatttgggaaaagctacttattagaggaatatctacgaataataatcagtctttcacaagcccaaaagctctgatatctccctccctcatgatcccattgctgttgatagtgttatgcagattttgtaaacaattaaatctgttcgcatgcaaacaattttggtttaaccatgaacaacaataaagaagttcatatacttcttttatgtaattcacgatctacccatgctccttttaaaagcatactaatatatcctattatgtattccaaagctgttatacgaaagtgaatgttcttttcaaaattctttttgacatgccactggagcagctccagaaaaaaattaacacttttggggaattttattgcatccctttcagtagccaaaaaggaagcgggtggggcgggggtggggggctgaagccaaagattaaaataaatgcataattcatttttaacatggtaggttttctctcattcttcattgtaatagctctagaactaattttactgttaacactgaatttttagaggggtgttgtataaaccattttttacaaagaaggagactaaaaagattttctgctcaccatcagtgcacaaaattgaacaagtgaaaatcttcacacacaatatgcttccaatgagcatgctcttatgcatcaaagaggaaacaaagcatttcaggattatgtttgtaaaaggattgtttttgaaaaaaataaaaaagcatagagcaaatttcagagtggaaaaacatcaaaggcttttcaatagtcaaactcatcactagatttaaggcaacatttaaagcaagacatctgtgttatttatataatatcaaaaagaaaaagcacaaaggtagactcaagacaaataaagaatccacctcctatgctataaaatacttcttatgtttgtctctctaacagtatgctattattctagcaaggcaaatatgttcttaaaagggtatcatgttttgtatgatgctgatgagcgcagctttttcatgtgtcttgcttaatgcagctaaatactacgaatgctattcagttatcaaagatacaaagaaccattcaagtttaggaaattactagactctttcttacagaaacacaaattattataatgtattgttttcatcttcctgcccaatatccaaactttataatccattctatttttctctcacattgtaccatgagacacttttactgcgagcagtaagtatgagaatgcaaaatctagggaggggtgaaaagaagtaaaagaacaacaatgtaaaggaggggaagctgacatggagaaggaaaaataggattcaacactcttggattcagttattaattcttaacaaatgtccccagggagctcacccagtatttctagaccagatggaaaaaacagtatgctacagcaactctatccctagacccagctgtcatgaggaatagagaggcaatcccagtaaggaactaacatctaacaccatacttcatgtgtgctgcgccattcatatacaggctgaccttaagatggtgactgttttgtttgttggttggtttttgttttgttttgctggcttcttatgtatgtgcctctgttttttatatcaatccttgacctctctccaaagtccaatcatgcatttccaggccctgccaatgatctcctttgtacctttaagtcaacattccccaaaaccattcattttctcctaaacctgaaaaaaagaaaaaaactccaccacttgactttttccctgtggctggcaacaccattctctcaatccttcaagcattacattttaaaatgataactgagttttccttctctctcttcatcatatcaagatcttgctggccaggcacagtggcccacacccgtaatcccagcactttgggaggccaaggcaggtggatcacgaagtcaggagattgagaccatcctggctaacacggtgaaatcccatttctactaagaatacaaaaaattagccgggcgtggtggcacacacctgtagtcccagctactcaagaggctgaggcaagagaattgcttgaacccaggagacagaggttgcagtgagccaagattgcaccactgcactccagcctgggtgacagagcaagacaccgtctcaaaaaaataaaaaaaaaaattcttgccaaattatatagcctaatagcaaaatatttgtcaaaagtcgatccccttggccaagcgtggtggctcacgcctgtaatcccagcactttgggatgccgaggctggaggatcacaaggtcaggagatagaaactatcctggccaacatagtgaaactccttctctactaaaatacagaaattagctgggcgtggtggcacatgcctatcatcccagctattcaggaggctgaggcaggagaatcacttgaaccagggagtcagaggttgagttggaggttgcagtgagccgagatcacgccagagcactccagcctggcaacagagcgagactacatctcaaaaaaaaaaaaaaaaaaaaaagtagaacccctcttttccaattttgttatgtaattccatcccaaagtttggattacccaggcctctcacttaaatggtcacaaacacctaactggtctccccaccttcaatctctttatccccaattcattatatccactgctattaaattaatattcctatggcacaactgtgatcctcctcctccaattctcaaaaatctttagtgaattcacaattattgaaaatatttaaaatcttttagccatgaaaatcaaaggttttcatgatctcacctcaatctcacttttcaaaatgatctcacacaatctccttcatatactccatgtttgaaccactggactacatattattaagtgaaatgtacctgagcttgcacatcttgtgtctttattcacactaatcttccctccttgtttgctgtgatagggactgtgctagatagtatgatacaaagatgaataatagatcttatataggttctaagcttcttagagaagcatgagctttggaattagataggactggggtctgaattcagattctgcaattgccagctgtctgatttggggcaagctcttaacctgagagacagctttttgagctgtgaaatgatataataacatctaccttggaaagttgccaggatataaattacatattttaaaagcatgatatggtgtcttccatttaggtaagtcttccttctgaaataccaacattagcttccccaagcagaatgcactgatgacaataatgagttagctgtcacctgcaaagatcctgagttagtacagacagagaacaattgcagctttcctctactccttttcttccttgcagagacaaatgagggtgacctcacagtttatgcctcgtaacgtttgcctagtgatcttttccattctccaacaccatccaggcaataagcatcaatgttaatgagctgctggacagctttgtgaaactgactgaaagagccagataggtattggtgtcctacacatgcaaataatatactttcccttcaaatgtactatttttatataagtttcaaaagttacatcctggtggaatgacagtacccaactgaaatatgttttccactctatgttactgcttacttcaacgggaaaagaatatatttacactttgccatattatgtaaacatggaaaactgagctaactagtgtcatgttattaattgactccagtgatattttagcatcctttatagattggccccctggactcgtaactgcccgtaatccaagtatgtatatgtgaaataacctcaggggtcggtgggagggggaaaggggttatttacacagtgtttgaagaagtgcaacacttgcagtttcaattccagaagtagtaggtaccgaggcatcctggatagactgtaaaagagtagtcaagaaatcctggcagttatcaatgactagaagccaagtaaaagctgcaagtcataattgctggaaatttgtttacatgcaacagtattttcaagggaaagtaagaagcagagggaaaagggcttgatatagagcagacatccgaacccaagtacttaatagtaggaggaaaaagaaggctgaaactagcttagaagccatctaaaaaagaaatatttagttggtctttatttacactaaattagaaaaaattttacttaaacctatgcctcagtctaaatttcccagtgaacatttgtggagatttggctatctagaatccatttcttccttctttgggcaacagcatccttatttcattttagagaattccctcctctctattgtatccagtcttggtggtgctacaagtcaacatgccctgtgctcctctaaccagtaatcatccaagctatgccagtaagactctccaaaatttaaatctaaagtggagtagcttaagaatggaaaaggataaagtcccagaaatagcgctccaacaaaactattgtgagtatcttgctgttcagaaaccgtaagcctggtcactagcttttaccttaattctgctgactacccaataatctttcaataaattcctttctgcttccttaactagacttggttcctattgttggcagcctaagaagccctgataaggaattaaagccattttgcctaactttgtccctggtctttccaaatgaaaactacaaatatttgaaaacaaaactaccctatagtttgttgaacggtgtttttatggctctattacagaagtatccagcatacttgcatttttcaagcacacaaaacttaaagggggcatttttgtttacttttcctacctcattttcagcagtattcactctattcccactgtttcctgccacgcttccccattacacgattttcttcataattgggccaaggtttactctagtaacattagctgtattgatttatttgtacatttgctgtctcgagaacttaagtaatttgagtagctcatattattgtttacatgttcaattatcttgtacttcttaacattttcaatgccattgcctttattctagtatcttttcacaaatatgcattactgtattaagtacaatgtgtccaaaattaattgttaaaggtatgataccagtatttgttcccccaggactcttcgatgaaataaatcagtaaaagaaaatctaaatgtataatttataaatttatagaaattgagaaatctgaaaaatgtagtgatcacctaatctaaggccataattttatagataagggaataggtctccctaggccattatccttgattccaacatctccattgatttattttgggttttatgtgttttctgtcattgcaaggggttcagggaaaaagatagcaactgtgtatgtccggtaatccctcttaaacaagaggaaaaagggaaataatctgacatcccaacttaaatcaggggcaccagtaatctcacagtaatttaaaggtcaaagtttacagttatcttaaatttttatttaaatctccttcctattcacctggccactgtaaagattaaatgaaagtaatttgtagactataaaatgttatatgagtcaagattttgttaatattgctattcttcatcctttcccttcccacggcacaaacatagagccattatggccttacatcaaaattataacacaaaccaataaagcccccatcccctccccattgcaacccatcctataagacaactttttgtactagactttcaattctttcaaacttttaagaaataaataacaccaattatatcagtctattttcacactgttgatgaagacatacccgagactgggaaatttataaagaaaaagaggtttaacggactcacagctccacgtggctaggaaggcctcacaatcatggtagagggcgaaaggcatgttgtcttacatggcagcaggcaagagagagaatgagagccaagcaaaaagagtttccccttataaaaccatcagatctcacaagacttactcactaccacgggaacagtatgtgggaaaccacccccatgattaaattctctcccaccgggtacctcacacaatacttgggaattatgggagctacaattcaagatgagacttgagtggggacacagccagatcataccaccaacattacacctactcttccagagaacaggaaaatataaaacacttccaaatgtgtgttgttgttgttgttgttgtttgaagccaggatagtattaatatcgcagcctcacaagaacattgcaaaaaagcaaagtcaaaagcaaatcctaatcgtgaacatgagtacaaaacacctgaacaaaatttcagcaaatcaaatcctgcgatatatagaaaggataataaaccatgatcaagctgggtctattctaataatgtaatatcatttactacagtaacaggatgagggagaaaaatcatatgattatctcaatagatgcagaaaaagcactctataaaattcaacaccaattaatgatttttaaaaaagaaactagcaaactggcaataaaatgaaactgccttggactgataaagcaaatccaaagaattcaaaagtcaggatagtggttgtcctttgggagtagtaaatggaatgagtaagaaaagagcttcagaagagctaatttctttatctgaatgcttaaaacccaaacgtggcaagttcatgagaatttactgagctgtacaaatacagtatgagcactttcttctatgtatattatacttcaacaataaaaaaacctatagcagtcatacttaattatgaaataataaaagttttcttcttgaaattggaaattacacaagcatgccactaacaccattgttcttcaacaatttattggagatcctaggcagtgcaataagaaaaagaaatagaagacatgaaggacgacaagaaagaaatttcatgcagaaaaccccaaaataatctatggataaagtattagaataaaaatacatagcaagattattggatttcaggtcaaaatagaaaatcaactgtttctatatatcagcagttaaaaaaaaagtttttaaatgacaccatttataacattaaaaatatccaacacttcggaaactaatggaagatatgcaaggtccttacagagaacactataaaacattattttaaaaatttaaggaagaggccgggtgtggtggctcaaacctgtaatcccagcattttgggaggccgaggcgggcagatcatttgagatcaggagttcgagaccagcctggccaacatggcgaaatcctgtctctactaacaatacaaaaatagccgggcatggtggcaggctcctgtaatcccagctacttgggaggctaaggcatgagaatagcttgaactcgggaggcagaggttgtagcgagtggagattgcgccactgcaatccagcctaggtaacaaaatgagagtctgtctcaaaaaataaataaataaattttaaggaagaaataaatggagagatatatcatgctgatgaaagagaaaatactgaaaatgtcaatttctccaaattgttctatagattcaatgtgattccaatcaaagtcccagcagaatttttgtggaaattgacaagatgattataaaaattaatataaaaaaatcaagagaattttgaagaagtgggaggaggtacaccatcagacaactagaataattaagacagtatggtattggcacaaagataaatgcatgaaccaatgaaacagaagagggtgcaaaatagactcatacatatattttaaaagattgggctgggcacggtggctcacgcctgtaatcccagcactttgggaggctgaggcaggaggatcacctgaggttgggagtttgagaccagcctgaccaacatggagaaacccatctctactaaaaataataataatacaaaattagccaggcgtgctggagcatgcctataatcccagctactcgggaggctgaggcaggagaatcacttgaacccgagaggcaaaggttgtggtgggccaagatcgcgccattgcactccagcctgggcaacaagagtgaaactttgtctcaaaaaaaaaaaaaaattgtactgcagagccacagagaaacaatgatcttttcaacaagtggtgctggttcaaataaatatcaatagcaaaaaatgaaaactgctatatgcctcacatcatataaaaaaagaactcctaatagatctatgaaaaaataataaaatatcttaaaagtttacataaatgaataactcatgacctttatataagcaaaattttctttttctgtcctttaatttcaacttttttttcttgctttttttataatttcaacttttattttagattcggggtagatgtacagatttattacacagatatattgtgtgatgttgagaattagggtacaactgatcctatcactcaggtagtgagcatagtattcgatagtttttcaactcttgctccgccgtcactcccctttctagtagtccccagtttctattgttgcaatctctacgtccatgagtacctaatgtttagctcccacctataagtgagaacctgtggtatttggttttctgctcctgcattaattcacttgggataatgtcctccagctacatccatgttgctgtaaaggacatgatttcaatcttttttatggctgtatagtattccactgtatatacgtatattttctttatccaatccaccattgacaggcacctcggttgattccatgtctttactattgtgaatactactgaaatgaacatatgattgcatgttctttttggtagaacaatttattttcttttggatatagacccagtaatgtgattgttgagtcaaatgatagttctaagatatttgagaaatatcccacctccacaatggttgaactaatttacattcctaccaacagtatgtaagtgttcccttttctccacagccttgccagcatctgttgttttttgacttcttaataacagccattctgagagatggtactcattgtggttttgatttgaatttctctgatgattagttatttgagcattttttcatatacttgttggtcacttgaatgtcttcttttgagaattgtctgttcttgtattttgctcactttttagaagggatatttggtttttgctttttgaaatgtttaagttccttatagattttggatattaaacatttgtcagatgtatagcttgtgaatattttctcccattccataggttgtctgtttactctgttgatagtttctcttgctgtgtagaagctctttagtttttaaattaggtcctactcgtcaatttttatttttgttgcaattgcttttgagacttagtcataaattctttcccaaggccaatgtccaagatactgtttccaatgttttcttctaatatttttatagtttgaggtcttacatttaaatctttaatctgtcttaatttttgtatatggtgaaaggtaggggtccagtttcattcttctgcatatagctagctggctatcccagcactatttgttgaatagggagtcctttccccattgcttatttttgttgaagatcagatggttgtaggtgtgtggcttcatttctgggttctctattctgtcccattggtctatgtgtctgtttttgttctagtaccatgctgtcttggttaccgtagacttatggtatagtgtgaactccaataatgtgatgactctggctttgttctttttgcttacgattgctttggctatttgggctctttttttagttccacatgaattttagaatagtcttttctaattctgtgaaaaatgacgttggtagtttgataggaatagtattgaatctgtagactgctttgggaagtatggccattttaataatattgattcttccaatccatgagcatggaatttttttccaatgtttgtgtcatctataatttctttcagcagtgtttagtagttctccttgtagaaatatttcacctccttgattagcagtattcctaggtattttgtttttgtgtgtgtagctattgtaagtgaaattgtgttcttgatttggccttcagcttgtacattattggtgtatagaaatgttactgatctttccacattgatttcatatcctgaaactataatgaagtcatttattaattccaggagccttggtgcagtcttacaatgttctaggtatagaatcatatcaccagcaaggagagacagtttgacttctttttttcctatttggataccttgtatttctttctcttgtctgactgttctaactaggacttcaaaattttcttaaattgaatacaaaaaacactaactacaaatgaaaagattgataacttgcattagctaaaattaacaactattattcgtcaaagacaacattagaaagtaataaggcaaaccacagatgggaaaaaacatatgtactaggatggctaaaattaaaaagattatcaataccaaatgttttggataagaactactcatgtatttccaggcggagtataaattttttacagccactctggaaaaatatgcatacactataacctagcaataccatttttagatataacagaaatgtgtatgtatgtgcatgtgtgtgtataccagttagaaagaagcatgagggtgtttcttagtactggtaatgttctgtttcttattctagatggtacttgcataggtcttttgcttcataataattcataaagctgtatacttacagtcagtgcccttttctgtatgtatgatatacttcaatttttttaatcaggggaaaaataaggagagaaaatcaccaatgtgaaacaaatatcagaaatgcccatccaggaacctgaaatcatttctcactggcacaaacactacccagtgataaaataaggacttgatatttagacaacaacaaaaacctgatgtttcagtttatctatacagccttagtaaatgtaagtatgtaatttcattaagctttctgaaatgctaaaaacaattttaaagattcttattgtttttgtgtacccttttgtattcacagatcccagattagaaattagtgccctagtctgaaaagaaggatcaccagacaaaaatattcagtaaatgttgcctcttctctttataatctatatgttaggtttacactgaaaactatctctttagggaaattatatagatacaccaatcctaagtaaacatttttaaataaaatgatgagggtcttattctcaattgtttccaacactagatacattataaaaagaagttttgtccctataacccccaaatctatgttctttgttaatcagtgtgtcacagttcaaatcttaatcacatccaaaattttgtgaccttgggcaaatttcttaatctgtgtttcaatttccatatctggagaatggggatgatgtgactaatacctacctcatagggctattgtgaagattaaatgcaataatgcatgtcaatcacttagcactgtgtctaaatgttaggctattattattatcaccatcatttttgcctatttatttattttttaaagtaaaacactaaattgctgattacaaatttgtgagcatgaggaagactgttgacataagggcttcattctcagtgatcatgttaggaagtaaccttgtactgggggatttctagatatcagtatatgaagtcttctttggagccactcgattctttcaaagaagaatacatttttctcctaacctggaaagtgctgtctagttgatgatgctgtgcaaaggaacaggaagaggagtttaactgctccatagatcaactttctacctatccctttgtttactgcttaaagactcattccctaccctcagctctacctcgtagttccaagcccttcaaatatttaaagatagccgttattttattctgagtcttctcttctccagttagacatacccatctcctttaactatttacagaccattctctttcatcatcagtatattcattcaaatctctgttattgtgatggttaattttatgtgtcaactgggctaggccacagtacccagatatttgatcaaagattccatgatggcaatttttaaatgagaataacactaaatcagtagactttaagtaaagcagattgccctctgcaatctaggtaggcctcgttcaatcagttgaaggccttaacagtctgacctccctaaaggaaaaggggattccaccagcagaccacctttggactggaactgcaagtcttccctgagtctcctgcatgctggtatgctctgcagattttggacttgccaaatctccataatcttgtgtgccaattccttaaaataaataaatctctctctctctctctctcacatatatatatatatatatcctgttggttctgtttctctggagaaccttgactaaaacagctatgcttcaggaatacaagtagaaaacactacctacctttgtggatatgccagtctaacctcactttattatatccaaataactcttaaaactgtttctaggtcacatggacctatgcaatcagaccaatgcaatttgaccataatatagaataaataaactgcaatttcacctccctaatataattattttaccgcaaccaaagagcaacctaatccacatcactgcttatattgagtttaccataataaaatccccaaaaacttcccacaagaactgttacagctcaccaattctgtatttgtgaattgttttggggggcctgcacataatacctaacattttttcctactaaattttatcctctgaaatttagtttttcattgactgctgtcaagatattttggattccagattctgtcatttcaatacatttacaaatactctcagctccatactaatgaaatattagtctttatcaaactaaaagaggcatagctaagatcaagagaagtctctgacatcatcaactataaacaaagcctgaattcaaataatactgacatacatatgctgctattaaaattctcagggagtattagatatgcaaggaaggtgggacatatgctgctccagacaggcctggtgtcaactgctgtctctaaacttacaagttttataactggacaatttgcttattcctcaaagagtttcaatttccttttcaataaaatggtaaagataaaacttacatcacaagactggtgtgatgttcaaaatacacataaagcacttgacagaatgcctaatacattgcaaatacttgacatgtgtctactttgaagcacgtattatagtaagaactcagcaaaggtgagatacattcctgcttcatcactttcccttggatcaactataacctaaataacttaacctctcctggccttggggtaaagaggtagacagagggggagagaggcagatggaagaataaagttgctgcatgaagttgctacctaaagagactattttaaaggctgagaatcctttaaaagatatcaaatagtttagaaagatgctttgacttgggctgttagaaaactgcagcttctagtcagaaaagaataaatgcagtgatgtttgggatttggttaaacatttaaattgcatttcaaaatgttggatttggcaaaatttaaaataaattttgccaagtccttaagttttttacttgcatgtattcaagggaaagccagcttgtagatttgaatcatttagatttaactcattaaaatgtatagagtgctttatcaagccacaaaaattgtgccccaaatcatttacagtttaacttagaaaaaaaaaagtcttatataaaccacagctcttgtacactaagttgctgagacttagaagaaaagattaactcagaaagacctcaagaaagaaagaaattttgaagaagtaatgaaaggagtggaatagcactgaatgcacaggaaatggaaaaccattccaaggatgcagacagaagtgatattacataatagctgacacagactatatgcaaatttcagtgattggattttgacttaaagatattttcctgaaatgtctggaagaacaatgggactttgggggcatccataaaattataatcaagatctattcagcagatgtttactgtgtgtctccacgtgcaaagctctctaacaagcactgagaaacaatgctgaatgggacagacatgtccttgccttttggaagcttacagtctattgacaaaatagacttttttatgtgaaaacagaaaataataagggctaggaagtatcaagatgtaggaagcagtcgcattatacacggattttaaggtgtaacataaaagaatcatacattttcaatttcttagggactttgaagttcatcagtccagtttttccaagaggaatccaagacagcaatatgtaaactgcttcgattgaggtagggggcaaaaggaaaagcaaagccagacctggacacaggtgtcctaactctatatcaaacatccattccttcattcaacttttacgtgatatttactatgattaggcactgtgctaagtgctgcagaaaaggtaaaaattaaaaacacctctccctaacatggtcctggaagagagataagtatgaaaataaacaatccccaaaagataaatgatgtaacagaaaaattgcacaaagttgtgcagcacccaaaagcaagaccctctctgcttaggaagacaatggtggctttacatcagccaaatcatataaaatgagtaggattttcccaggaacataaaaagaagagaattcaagaaagaagaaagaggccaggcgcagtggctcacgcctgtaatcctagcactttgggaggccgaggcaggcgtatcatttgaggtcaggagttcaaaaccagcctggccaatatggtgaaatctcgtctctactaaaaaatatatatacaaaaaaattagccgggagtggtggcgtgcctgtagtcccagctactcgggaggctgaggcaggagaattgcttgaacccgggaggcagaggttgcagtaagccaagatcatgccactacattccagactgggcgacagagtgacactgcttctcacaaaaaaaaaaaaagagagagagaggaaagaaactgtgcaaagaacactgtatgtttggaaaagtataagtataaaaagtatgagttcttttacttctgagctttttttcttaattagttttatcaaagtaatacatgcacatagtcagatggtgcaaaaagactcgaaacacagcagtcctgtggccacccttctgctggttacactaccatcaaggttctctcagtcccagatgcaaccatgttaaattggtttagctgctgcttctggcatttagcgccatgcttctaaatcacgtgtgtctatactgatatactggtatcctacacagtataagaactttcacctcatacccacttcacccccccaccccagtccccaatatggttgaaacataatgtggggtgatatccataattgtagttataatgactaagtaaatattgcttgctgattaaggtattatactctgactatatttcctctctgtgataccttttcctttttctaatgttgatttgcatgtacttgattgttctcttctactctctggtttaatcttcccccacattccaatggctctaaagccatttctaaataccatttttcttatagtcaaacctatcagataatctatttttccccatgattatgccccctagaaatctgcccctgtactcaccccttggcctgtcctaggaattccttctgtctatggtgtaaaccaagaaataggaagcctccaaatctaggaaacataggctctaacaatctcactttgatagaacccacattctactagcttcctgagaaagaatgcatgagaggtaaatttattttcatacatttgtcagtcatccttgactgatattttaacaatgtaaacaattcaaggttgaaaattgctttccttcataattattatcttctagtttctagcgttgatttgtggggcttttcggcttctcaaagtatgagttaggattgtgtttagttgtaggtaaaataaaatccaacaagttataacttagccaaatagggaacctgaccaggtgctgaccacacctgtaatcccaactctttgggaggccaaggtgagtggatctgctttgagcacaggagtttgagaccagcctgggcaacatggcgaaaccccatctctaccaaaaatacaaaaattagccagacattggtggcttgctcctgtagtcccagctacatggaaggctgaggctggacagtcatttgagcccaggaagtggagggtgcaatcagatcactccactgcactccagcctgggtgacagagtgagaccctgtctcaaaacaaacaaacaacaacaaacaaatagacaacctcccacccccaatgtaacaagaaatccagagacaggtagttgctgaaattgattcagcagttcaggtatatcagagctgagaactctgtgattctcatggtcgcaaaatactgtagctccagacatcttgttcaggtttcaaatgagaaaaagtagaagagaaaggagaagattcaacagatttccacttacattttatgggccagcactttaccacacttggtcatatctaactacaaaggaattgaaaaaagtaagcttttagctttccggcctctacaatgaagaaaagcaagggttgaaagagacaaactggaatatgagataacattacaatgtgctttggtgtgcgtcttttcaaaaatcttttgtgctgggcactctttgagtccttctaagtttgaaacacatattttcagtcctagcaattttccttttaaaatttagttgatagttttatcctttttgttttttcattctctctggagagctcctaaaagtcaaaggttgaacttctgatactgatcatctatcttttttctcctatttcccatctcattatctttcacttcttttttattttaagttccgggatacatgtgctgaatgtgcaggtttgttacattggtattattttttacttcttttttaggagacttcctcatctgcatttaacccttttattgaatattttatttcttaagtgctttcttactctcttattcttccttttctatagtattatgtttttattttatggttgcaaaatcttctcatctttctgagggtactgattataattccttgaagttttcttctttttcctgacagtctttcttctgagctttattttgttattgttattgtttatttctttgttagttttgatctcttttcctgttggagtttctccttaattgactggtgataattgattctgtgtcatatctaagaatgaggtactagaagggtgactagaagctgcgtgcatgtggccaaagcttaatgagtagtaagctttactaaaggacaatcaggaagcccgttagtttcctcatcagggaagcccacatgtcagtatctacagagtttttctctgaagcatgttatcccttcagagaaggatcacctatctgaagaggtgttaagagagaaaggcagttataagccttgctgctactgttgtagaactcagcacaggaaggcagctagaagtctcaccattatgcagatcacttaattcccctcactcctatcctccctactttgcagtctctcaggttcagttcttcacagattatacgtttcatatgcagcagagacagggaagtggcagttgttagtgcctagtagggatgactgaaaaatataattaattttaaacaattcttttgtttgtatgccacccacatcatctctccctcacaatcacactccaacttccataatacctaatttctgattcctaagcctatctcagattctgcaggatgaatcagtttgtttatcattggtatatccctctgcagataattagattttacattcttgctgctaagttatctacaattcttccatatgctttcaattttcctatactacagatgaaggttagagaaatctagttttcctaaagatggaaagtacctgttgcttttgtttgtttgtttgttttaagtgatttctagtaaagaagtactttttctgccattttgaaacaggtaagtctctaattatgaatttaaaacttgaagacattgatagatatgaacaaaatatgctccagagcaaaactctacccattaacaaccagatcatgcacgaccagattagaatggccattatattgttggttatccccattctggtaatatgacgtagcagctaagagcatgagctctgaggtcagattgcctagccttaaatcctgtctctaccactttacaagatgcataatcttgcacacattctgtttatattatcctcttgacctgaaaaaatgtagagtgatgatgaggattaagtgaacaaaatgcctggcacacaagtattcaatatatacaaactactattattaactccaacagatcaaattttccaaagtagtgagagtaatatgcactaagcgccttacagatattaacttactgaatcctgaaaacaatactatgaggtagggatatcaccgtgccaattttataaaagataaaactgatagatgaacaggttaaataacttgcccaaggtcacacggccaaaagtagataacagggattcaatctgaagaaatctggttccatcgtctttgatcttaaccacttacaatacacagcccaaggatagcatcattcaaatttgagtccccaggttctctctagctctcttatggaatgccaagtaagttatattcggtaccacagactaacttaaaggaagatttcaaaacgacactgcaaaatttggaccaaattatttctccatttaactgccttctatgtacaggtagtagtatagaatagttgtgtacatgtgatgctcatttccataatgagtaaaggacataaaacataaaaatatcatgcagtttttaggcctattgctcccaaatcattcactctgattatatcctttattacagggaaatgtgttttctaagtctatcttctttgcatggattgaaagatttgtgaaactgaaaactaaccttcctctgccaagagccccatcaagacagaagttcttaattaactaagcaattagtcataacaagtgaaagctaaaatggagcatgaatacataatttgctgattatttttctccactagaacccttagccagaatttaacaaaaagtgttctgtgggtgctagttttgggaaggatggtaaaacctggacagaatgcactgaacagctatttgagggctccaaagagtaaagaattgcagatggattggagaagaccagaattcaaagtatcagcagtgcgtttcttgtttttccttagtatcccccagtctggtgtctacacctggtacaccaaaaccaggagtagacaccagcatacaaacagagagatttccagagaagtcctctagctctggctcaacaggtaggaaaacaaagagatttctaacactcagagagagtgggggaaattccaggtttttctcttatatcatcattattacttatgttttctctctttcatgcctcagtctccaggccatcctgtggcagtggcagcagcaacaatggcaagcaatggagtgattcacaggtgcctgaaacttggatagaagtgtagtccacaagagagaggcaaactcctactgctttttctctctatctctgtttacctacctcttgaacctaaacatgggtacaactacaggatgtgtgtggcagagcaggataactaaaactccagtttgtggccaaggaaccaaaaaatactggggatattgcggagaaagggttgggatatgagcccgtcctgagctgcacatacagagatatgatcttgaacacctaacaaagacttgagaaatgaattaaactactgaccactacccagatctcagactggctgcttggttgcaaatatgtgggacagagcaaaagagcatcacagagcgtttgaaaacgaattgacactgaaaccacaagccactgaaggctgatcagaccttacaacctgaattctctgggttgattgcatgctaaaataaaaatatcaacattcaccataggatgtaaataagacccagagtctcataacatgatattcaaaatgttcagaatataatacaaaattactcagcattacaaagagccagaaaaatttcaaattacatagaggaagaaatttcacagacatcaatgccaagatgatacatatgttagaattacctgacaaagatgtcaaagcagctattaaaaacactcttgaaataaatagaaagtttcagcaaggaaatagaagacgtgaagaagaaccaaatggaaaatttagaactgaaaaatgcaatagcaaaactttgaaaactcactgaatgagttctgtaacagaataaaaatgacaaagtatcaataaacttgaaagcagatcagtataaattatccaatctaaacaacatagagaaaaatactttaaaaaataaataagagcctcaggacctgtaggacaatatcacaatgcctaatatgtatatcatcccagtcccagaaggagagaagagagagtatagtacaaagaaaaacaatgtaattgctaaaaactgaccaaatttgccaaatgacataaacccagaaattcaaaaagttcagtgaactccaaaaagaataaaccccaaaatacccatacctagacatatgataatcaaacttctaaaaattacagaaaataatgttggaaagtaaccaaagaaaaatgatgcattacttacagggaagcaatgatttcaaagtctgaggatccctcatcagaagtgggagctaagctatgaggaaacaaaggcataagagtgatataatggactatagagacttgcgggaaagggtggggaagggggtgaaggataaaagacaacacaatgggtgcagtgtacactgcttgggtgatgggtgcactaaaatctcagaaatcaccacctaaagaacttatccatgtaatcaaacaccacctgttcccccaaaactactgaaatcataagaagaaaaataattttttttaaaaaagaagtcatggaggccagaagaaagtgcactcatttttaaagcactgagaaaaaggaaccatgaaaccagaattctgtatctagcaaaaatactcttcaggactaacaatgagataaagacattcttacatgaagaaacactaagagaattttcattagcaacagacttctctacaagaatgactaaaagaaagttcttcagccagaagataatgatgccatatgcaaatgtggaacatcagaaaggaagagagaacaacaggaatggtaaatttctgggtaaatataatagactattctttcaccctgagtcatttagagtatgtttaacagttaagagcaaaaaacagagcattgtctgatgagattttcaatgtgcaaacagagtccaaaactaggcctacaaaagtatgatcaatgggtttttgacgaaggtacaaaggcaattcaatggagatatgatagttttttccataagaggtgttggaacaaatggacgtttcgaagcaaaaaaacaaacaaacaaaaaaagaacctcacgcattatacagaacttatcttaaaagagaacatagacataaacataaaacataaaactaatttaaaacatcaaatatagttttttgagtaataattggaaaaaatcttagtaacattagtttaggaaatgatacaccaaaagcatgattcataaaaaaaattttgataaattggacatcatcaaaataaaactcttgctctgccaaagaccctgtaaagaccatgaaaagacaaggcatagacttggggcaggggggaatctgcaaatcggccgggcacagtggctcacgcctgtaatcccagcactttgggaggccaaggcgggtggatcacgaggtcaggagttcaagaccagcctggccaacatggtgaaacctcgtctctattaaaactacaaaaattagccaggcgcattggcaggcacctgtaatcccagctacttgggaggctgaggcagaagaatcacttgaacctgggtggcagaggttgtagtgagctgacatcgtgccactgcactccagcctgggtgacagagtgagactctgtctcaaaaaatctgcaaatcatatatcaaacaaaagatttgtatctgactatatgaaaactccccaaacttaagaaaacaaacaactcattaaaaaaaataaatacatgatttgaaagaaaacttcaccaaagaagatacatagatactaggttggtgcaaaagtaattgcggtttttgtgattactcttaatgctgaaaaccacaattacttttgcaacaacttaatagtaaataagtacatgaaaagatgctcactgtcattagtcattagaaaatgtaaataaaaatccacaagaacatgctactacacacctattagaatgggggaaaaacagacaactgcaggtattagcaagtatgcagagccattggaactctgaaacattgctgatgggaatgtaatattacagccactttggaaaagtttggcagtttctgacaaaggtaaacattcatttaacttatgacccagtaattccactcttagttatttgcctaaaaggaatgagtatttgtttcacaaaagcacctgtacatgaatatttacagtagctttattcataaataaaaaatgcatatgtccttaaactggtgaatggatggaacaaaactaattgtggcacattcatacaacagaataccactctccagtaaaaatgaactattgatacacacaacaacatgggtgaatcacaaatgcactatgtaaagtcaaagatgacagatgtaaaacactatataccatataattccatttatatgacattctggaaaaagcaaaaaaacagggacagagaaaagatcagaggttgccaaggattagagctagggaaaaggctgactacaaaagagcagactgaaggcattttcagagacaatggaaccctttagtatgttcattgtgatggtggttacacgattacatatttgtccaaactcatagacctgtacaccaaaaacagtaaattttattgcattttaacgtttttaaattttaaaacaaatttacctatttaaaaaaaaaaacaaagacagcaacaacttaggatcccatattaccatcactatttaatgtgatcttagacaaatcacttaatatagagctttggttcccccaatttttaaaatgaaaaatatagtatttatatctcataggtctttataaaaaagttttttaaaggtttcaagatcctgccttttcacattctatttcttctgaaatgtttcttcccatcctctcttccctactttgcttggctaaatgctatttgattttcaggtctcagcttaaacgttattttttcataaaagcttctcctaactcacattttaaatcagggcctcagctatgcctttactgcccagtgtactcttatttcataacacttctcatgtccttttttttttttttttttgagacagagtcacccaggctggagtgcagtggcccgatcttggctcactgcaagctctgcctcccgggttcctgccattctcctgcttcagcctcccgagtagctgggactataggcacctgctaccatgcccagctaatttttttgtgtatttttggtagagacggggtttcaccatgttagccaggatggtctcaatctcctgacctcgtgatccgcccgcctgggcctcccaaagtgctgggattacaggcttgagccaccgcgcccggtctttttttttatttcaagagcttaggcgtacaagtagtttttggttacctggctgaattttgtagtggtgaagtctgaagttttagtgtacctgccacccgagcagtgtccattgtatccagtatgtagtttttttatcccttacccctcttctactctccttatttctgagtcttcaatgttcattatatcactctgtatgcctttgcacgcccatagcttagctcccacttataagtgagaacatatggtatttggttttccattcctgtgttacttcacttagaataatggcccccagttccatccaagttgctacaatggacattatttcattctttattttatggctgagtagtattccatggtgtatatataccacattttctgtatccattcatcagctgatggacatttaggttggttccttatcttttcaattatgaattgttctgtgataaacatatgcaagcacatgtattttttttatagagaggttgtactaacttacattcccaccagcagtgcacaagcattcccttttcaccacattcacgccaacatctttgttttttgattcttaaataatggccattctggcttgggtaagttggtatctcactgcagttttaatttgcatttccctgatgattagtgagtacatctataggtaaataattttatttaatgtctgtctctttcatgaaatggtaagctctgtgagggaagaaattgttatcagaatacaagcagtacaaagtgtctgaaacactggtgaatattctgtacatatttttaaacaaatgtgcaaaaacacaatggcatttcctattgtgtaattaattctttcttaatatctttacctttctcactatttatatgtatagacacatgtatcttaatgtttttatcttcctcaccctgtatatatacacatacatatatatgtatgtatgtgtatatactatgcataccatcaacaaagtttcttagcaaatgtccatcaaaagataacaaataatagattatgccttggttgacatacctgtttactaacttttcctcatttgtagtcattaacactaattgaacctgacaaaaataagatgtgacagacctactgtatatccacaagtcaaattaacaaattagttgaagaatcaatacatctacatatgagtctactaactgttgggcatacatccagacttacatgcagaaaagcacttaagaaccaaacctttttccctcttatataagctgtcaaaaatgttacagatgtgacatttaagaaactcagagcatgacttatagattaccttatgcataatggtaaaaattcctctagaacaaccagcaacattaataattagttggaactcaattacggatacttgccaaagcaaatccccagaaagctatcttgtatctttcaacctggccttgtagaaatgatctaatgtagcatcctacagtgtaggtacgtggggtattaatatcccaccctccttgatgggtcagtaactgaaacagtgaaaggctcaatgaagatcgcagcactaataaacgatgggacaggtattaatactgcaatgccgcactgtccaatatggtaaccactgagccacatgtagctacagagcacttcaaacgtggctaatccaaatcaagaagtgctgtaagtgtaaaatacacaccagatttcaatacttggtacaagataaagaatgtaaaattctcattatttgtttatactgaatacatgttgaaatgactatgggttggattaaataaaatcattattaaaattaatatcatctgtttcttttcacgtttcaaagtgtagttactacagatttttaaattatatatgtagcttgtattatatttccagcggcatcatgatagagcactcctggatcagtatggttgaataatagaagacatgtggaggcaaacatttaggtttacttcccagactctaccatatacacacagagtgactttgcagaagattattgtatatcactaagatgacttttcccacatttaaaatcagaacattaaatctatgatacagtactagtacgaggttaaataatacattaaaggtctaataatgtattctacaatgaatagccacttgatgttaatttctcttttcctcctttttcctaatccacttccctgttaatttaagctgcagttaaacttccatagtggacagattagtccccatgcctactattcccagtacctcggtctaggttaacacaacctccatgaccagaaaaccaggtacagaatggtggtcactgagtagcccaaagtaggtatgacacaagtatgacctgtctgtagtttggcatagtctaatacaatgggctcaaatagtgaaaaacagcatatctgctcccttcagaattcatccaagaaacagagacagactggttaataacaaaagggtaatggaagcagacgtagaaagagacatagaagtaacaagatggaaaagccattcatttgttcactccacaaatattaatgactgtctatttattacatgctatatgacctgagagaggaagtaacaggggaataattcccagagctttataagacccagacaacttccagttccagtccaaatgtctctttacaataaatattttttctttagatgaatagatgaaggctctgctccttgaaactaaaatgacctaactaacgtagcttcacaaaggaaggcacagaaaagtgcctttttgttagacactcacacacacaaagacaaaatatgtattgccctaggtaataaatcaaacaaaaagggttcttcctcaaagtgggccattcctttcctaaaaccagtaacagacagaacagaaaacaagtggagatagcaagggctactgacccttaatattcctttagaaagccactaccagaaatacacttttaagtgccttacctgcactgcatagaaatatgtaggcaaagagaaaaaagatcggccaactaaaactacagactataagtacttattaaagactactttcactaacataaatgggattcactacatcagagtcccctgatcactttttgcagggcagtctgtgggcctcactaaactaatttgcgatattaaggtaaggaaagaagaatttcctcattctaaatgtattattggacaggcttgaagtccaggtcttaagtatggttacataagggacaacaataactatttgtttcaaattgtatctctttcaataaaacaatatctcagtggtttcagcagggagtacaaaatctgatctcttaaccctaaaattccaaccctggaaaaatggctcaccttcgccaaaacacacacacacacacacacacacacacacaactagagactgattttccacacaaaatttatgtacttattaaaaaggaatttactttataattatgtgcaagaattatcatggtgagaagtgaatgttggttttaatcattgccagtagatcctcccatcagccacataatcatattcactttatggaggaagcactattactccgtaccaagcatcttatataatatagctctttgttttcatccctgtgacaaaccatgtgagatggctgtgtgacccttgttttaaaaacaaggaaactgactgctggaaaggtaagtaacataattatccaagatctccaacctaacaaatgtcaaagtatgggagctgaccttgggcttttatgctcttgtccacaataatccagagcacccagaacatttatatctctaagaagttaagtttagaaaaatgcatctttttttgcatatatgtcaccaacttcgggtatttcttattacaagagacctttttgcttaaagattccaaatcaatcacccatcatttttctaacactataaattctaaatgcaaatgtcaactaagaaaggtctatgaacattttaaaaactcattttccccaaatccatatgagtctgaatgctgagaaattccacactaaaggtagaatacttaacaaaacaccaacatttcccttcagaaataacaaagggaaatataagtttgtgctcactttttcataatgtcatggcatgttaaaagatgaaaacctagtaacaaagtcaattaatagaatctacaatctttttaaaatattttagtagcttaagaagcatattaaaactagaacctaaatattaggctggaatcgtggtacatctttagctcttccagaatcatactcacagtggggctcacactgtattttaataagcttctaggtgggcccattcatctagcagcttaaaacctccccaggtgattccaatgtgaactccaggctgagaactgtcatagttgaaaaccactggactggcacatgagagcctgatttctgctgaatgtcctttctttgagctcttctcccccagtcctatgaaaagcatggtcgctgattaactcagagttaggtgaagaaaatcaaacttggagagataattataatagataccgtgatggttaattttgtgtgtcaacttgactaggctatggtgcccagttgtttggtcaaacatagcctccatgttgctgtgagggtatttttaaatgtaattaacatttaaatcagtagacttttagtaaattagattaccctccctaatgtagatgaggctcatacaatcagtcaaaatcttaagagcaaaggctaaggtttccagaagaggaaggaattctgcttcccaaatgcaacactgaaactctacctggctttccagcctgcctggcatgtgctgtagatttcagacaggactgcaacatcaactctttcctgaatttccaggctcccagcttgccttacagattgtgaacttgccagctcccataatcacatgagcgtattccttaaaataagtctctttctcactcgcattcatggtgtgtgtgtgtgtgtgtgtgtgtgtgtgtgtgtgtgtgtgtgtgtgtgtgtgtattctcttgtttcaatttctccaggggaccctaatgctagataccattatttaaacacagactatgtactagaaaccatgctaaattattcacatacattttctgagttagcctttacacaacccaattaaacagttgaataagcaagctataaagagaagatgtgaccagagatagggaagcttcctttagtggctgtggagagcaagcagtacagaagttagcactaggtgagccaagaaaaagccaaggacaaaagaagataaggtgttcattgaaaaaaacaaaagacaaaagggaaaggggaaacctatagatttaaaaatacagtgcccaccataggaaaccattcttctactttctgcttttattgctttgacttttatggacattacacttaagtggaatcacacaacacgtagtcttgcatctgactcctttaaagaagcataatgtttttgaagtttattcattttgtagcgtgcatcaatagatcactcctaaaacttcttgaatatagaagtggaatcatgtagtagtaggtctatgtttaaacttcaggaaactgtgaaagcagttttccaaagtggttgcaccattttatattcttaccagcaatgaaggttccacgttctccatatcaatgccaaaatttattattgctaactttttaaattataaacaattgagagtgtgtgtgtatgtgtgtgtgtgtttgtgtgtgtgcagtgtgtactatatagaggttgtttatatctcattgtgatttttttaaaatagagacagagtcttgctatgttgcccaggctggtcttgaactcctgggctcaagcaatccatctgattctgactcccaaaatgccaggataacaggtgtgagccaccatgcccggccctcgttgtgattttaatttgcatttgtctaatgactatttatgttgagcatattttcatgtgtttattagccatttgtagatcttcttcagtgaaatgtctattagaatctttgactattttaataaactttggatattggtacttattttaataaaccaactgtaaaatatgtttatgataaaattgtggaaatttaaacattcaaaggatacttgatattaaggatttattagggttgttttgggtttgataatgctattgcagttatgcttttagaaaaaaatctttaccttttaatgtgacacactgaataatttatagatgaaataatgtgaggtctgtgatttgctataaaataatccagaggaggtaggggaatttatataaaagattggccatatgttgacaactgatagttcttggagctgagaaaaggattcatggggactcataatactatgtttgaaatttccataataggtttttttgtttgtttgtttgagatgcagtctcgctctgtcacccaggctggagtgcagtggcatgatctcggctcactgcaacctccgcctcccaggttcaagcaattctcctgcctcagcctcccaagtaactgggactacaggtgtgtaccaccatgcccggctaattttttgtatttttagtagagacggggtttcaccgtgttagccaggatggtcttgatctcctgacctcgtgatctgcccacctctgcctcccaaagcgctaggattacaggcatgagccaccatgcccagcccacaataggttttaagaaataaaagctgacacaccgaatgcatgcattaacctacatatacactctctcaaaatctactaaatacaccgtaaagggattttttaaggcataagcaacaagaagaaaaggaatgggaatgaagacaacagcaacaaaactttggaagctagaaagtatatggatgaacatgaaccaacttgagaaacctgaatccccaaccagaagtggaaaaagccaagaaaacaacctgatttacacaacaaaaatcttcaaagggtttaggaataggtggcatcaggtacatctctggagataagtttgaaggtggaactgaacaccaaggaataactgaaagtagatttaagaaaatgaacctccagatattttactacactctacacagccaaccaaccacccctctcctactccagcaaatgactttggcttattttctgcagagtcaaagagaggttctctgcgatgaagaatccaagctacggttgagggtggggacaaaatactaaaatgaagaaaataagtaaaagtctacagattgaatatagagacttcttcctcagttcagctcccagaatgcttatagagaggctaaaagattagaagaatctggatgtccaacaagaaagactaaaagatgctgacattagaggaccccccaccatgtctgctcactccacagtaataagcttcacccacgcacacagagttcgcactagctttacagagcccaaccttttcttctgagtcattaattggtagagataacttattggggttcagggggttgatttaaaaattgagaactataggccgggtgcagtggctcacaactgtaatcctagcactttgggaggccgaggcgggcagatcacaaggtcaggagatcgagaccatcctggataacacagtgaaaccccgtctctactaaaaatacaaaaaaattagccgggtgtggtggcgggagcctgtagtcccagccactcaggaggctgaggcaggagaatggcatgaacccaggaggcagagcttgcagtgagccgagatcgcgccactgcactccagcctgggagacagagcgagactccatctcaaaaaaaaaaaaaaaaaaattgagaactacagaaaaagttacagatttatgactatatgaggaagtaatgaaaagccatttcatgaagcagtggtgaatcaagtttttactatatgttacctcttgggagaatagtttatactaaattacttgttttattaaaaaaagaaactatgccaaaaaagaaaaacaatataaatggtcaaatctaatatatttttggctttctttttgacaaactgtctgtaaaaatggtgtctattgttcccatatttatgaccatgtgtatccaatgtttagcacctatttataagcgagaacatgtgttatttggttttctgtttctgcgttaattcacttagaataatcgtttccagctgcaaccatgttgcctcaaaggatattattttgtccttttttatggctgtgtagtattccatggtgaatatataccacattttccttatccaatccaccactgacgggcacctgggttgatctcatgtcttcgctcctgtgaatagcactatgatggacatacggagcccaacttttaaatacaaatggacaaccaaggatcacaggacattttagaaaagccccaaacatgaaaaatgaaggctgaaaagtgaaaacctgaagagatttgtaaaataaacctaagtgttagataaactgacaaaatttcccagaaagtaaagtaaaaagatttttaaaggtacaaatggacgagcgcagtgactcacacctataatctcaccaatttgggaggtcaaggtgggaggattacttgagccctggagtttgagaccagcttgggcaacatagggagacccccatctcgaaagaaagaaaggaaagaaaggaaggaaggaaggaagggagggagggagggagggagggagggagggagggagggaaagaaaagaaaagaaaagaaaaaagaaaattagccaggtgtggtagtgcacgcctgtagtcccagctactcaggaggctgagacaggaggactgattgagtctgggaggtcaaggctgcagtgagccatggccatgccaccgcactccagcctgagcaacagagcgggaccctgtctcaaaaaaaaaaaaaaaaaaaaaacaaggtacaaatcgtgcttgatttaccatggttcaacttacaatttttcaactttaacttggtgcaaaagtgagaggccttcaacagaaactatacctatacaaccattttgtttcagtacactattcaataaattacataagatattccatactttattataaaatagtctttgtgttagattatttcaccccactctgtgatccaacaattcattatatccaacaatttattataaatatataataataataatatatccaacaatatattgttggatataataaatatccaacaatttattataaaataggctttgtgttagatgattttggctaatgtaagagttctgaacatgtttaaggtaggctagactgagctacaatagtcagtaggttaggtgtactgaatgcatttttgaattatgatgttttcagtttacaatgggtttatcaggacataatcccatcacaaatcaaggaccatttgtataatagttaattttatatgtcaatttggctgatccacagtgcccagatatttggtcaaacatgattctgcatgtttcttggcaaacatgtttttcgatgagattaacatttaaatctgtggattttgagtaaagctgattattctccataatgtgggcaggtctcatccaatcagtcaaagaccttagtagaacaaaaaatgaccacccagaagcaagaaggaattttgtcatcagactgaaatatgtattagtcagggttctccagagaaacagaaccaacgggatagagaaatctagaaaaataattactataagttacctagaggctgagaagtcccatgtggcgaaatctccacaaacacatgaaccaattccttaaaatcaatccatcaacccccaacccgtgtgtgtgtgtgtgtcctttcgattctatttctctggagaaccttagtaatataggatagtaagaaataaagcatttaaaaaaggaaagtcaaagccaggaggtcaacatcttaacaggatatccagaaagacagaacagaaaaaacaaacttgactaaatcaaataaataattcaaaaaactaccccagaactgaagaacatgactttctggattgaaagggcccacagagtaccaaccacaaaaaaaacagaaatagatccacatgaactacctgcttaacacaccagcacacctccctctaagaaggccaaaacccttactcagagtaattggcctacaatttcagcctcttttctatggagtccttcggttctggaaaatactcctgagattgatgaatagaaaagaaacaagagcaggcaggactctgggccatctgcccctgcttcatttatagaagccctgcttttacgtttcatattctagatttttggataagtttttttttactttgcatttttgcattggctattttttaattgtatctctttaaggtatataacatgatgttttgatatatatacacatagtgaaatgattactgtaatcaagccaattaacatatccatcatctcacactgttactctttgtatgtgtgtggtacaagtacctaaaatctactctcttagcacatttccagtatacaatattattaactacagtcctcatgctatacagtaaatctctgtgcttacgtgtcctacataactgaaattttatactctcgttgacctccatctgcccatttctcccacacccttcattcctggtaaccactcttctattctctgtttccatgtacttgaagtttcatttcgttttgttttgtttagatcctacaaataagtgagatcatatagtatttttctatgtttggcttatttcacttagtatcatgtcctctacttccattcatgttgttacaaatggcagtaactccttctttaaggctgaataatactccattgtgaatagagacaccacaatttctttatccattcatctatcaatggacacttgggttgtttcattatcttggatattgtgaagaaaacctctttctttttgctctttaaatatataaagagccatctctggtgcaaattccaaaagaaccgcccatgaccaagactattcctgctggatcacacctcatcctttccctagctcccaacaatgacatctagaatattatactgaattacatttcaggcctttgtggtctagcctagaacttaaatgtgccttaagatccaaacaagcagcttttaaacaaacttttggaaaatgctctctattcataaatggaagctctctgtgcctacggaatagaagcaaattcatttattaatagtccctaggtcactcataattagtgcaaaactagtctgttaactaggcaacccctgaggcttcaggaagtaattcatttatgtgtttgtttttcttcaatatttatagttgttgtcttgcacaaaaatctatctcacagagatgtctgaaatctcttcactggtcattaactactctgataaacattatttacttttctcttaaaacatataagagaactagagaaattctgaaagtaaatgagatagcacaaaaaaaagatgaaagaacactgaagataactttggtatattttataaatcttcccagagtctcggcttatagctgggtttaatgccttgacacatacatatttatcaaaattggcagagtaataaaatcaggtgagataaaaactgacatgaacactacaaatacaaacttactatagcttttttcaaaattatattcaaaatggaagcatctaactgaaaattgttactttcattgtacacaaaatgagtatatgtgtatatgggtatatgtgtgtatctctcaaatgcatcatactagcaaatttgagcaatgtttttcacattctcatttaaacataactaaagtcatcctcagtggctacctaatcagcctaattactctgggaattactattaaactagtgaaagccacacaaaagattggtgtaaactattccagattcaaataaaacatatcatttctatttttccattcacagctgccgaggaacaactacacagtcagcagctactagaataaaatcttacagtccattcaaatctaaaaagcaacactgtgcttatttaacaaacaagtatgctatttatctaccatactagtgcttagaacaaggacggggagccattttggctataaagtttagacagcttcaagatgaaggtctgagctaagccttaaaagataggtagggatatagaaaggagagggaagaggagttctaaacgaggacataaagtttgaaaattaaaagttaaaaaaaaaaaaaaaaaccctgaaaactaccatccagcaaacagttttcccaaatgcagagttcttagaagagaatgatgggaaataagattaagtaggtgaaacttacactgagaaataacagaaatatttagatagaagtacaatgatggaaggcataattttttcagtgtacatgtgcatattaaatagcaacacatataaagctcttagcacagtatctggcccataaggctaaacaaatatttgctattattgttgttattattattaactgaaaatttcaaatagtattttctgtagtttggacaactagtaaatatgactaccccgatttttaaaatctagaattaaacatttctatgtacttcttaattttatatacatgatctcaccacaaagccctcaatattactcaaaaggcacatctttatttccctgtacttcaaatcaatttctatctaaacagaaattcagcttggtctttccccaggcaatgataaccttctctgacactctctaatgctgatgtcctccaaacaggactttctgtcctccaaaaagaaaaaaccttccccaaggaacagcaagaaagaaggaagctttataatagatgaatttataggcaagtctgtctcttatctaacttctgtgagtgtccagccctgatcctgtgtctttggtttaaaagaaaaaaagccctgggtaagccaagctcagccctaggcatcctcctcttcttcctattttggccctggcttccatgaccctatctgttttctgtaatttgctacatataatgggtaaatatggaacaacgatgaagaaagcaaagattggaggggggaggttgccaaactgctctccgctttagccccgactttgatataagaaggcaggagagccaaggattaatatcagaggtggtttttcatttttcataacatttcagagcctgaaagactgtaacaagatggtgatgatgatgatgatgatgatgacgacaacaacaacaacatttcacatttatttaggctttcactacataatcgcaaaaacactatctcatattaacaagaataacagctacctggagatcaatgagtctagtcctctcattttataggttagacaacttaatgaagtcagagagattaataactttgccaagactacaaattagtggcattggtgataataacagtgatgataataatgatggtgatggtggcagtgattacgttaataacccactaaattctttgtgtgccttgtctcatttaatccttacagcagccctaggagggaagtactatatttatcttaattttaagctgaagcaactaagaatttaaaagatcaaaaaacttgcccaaagtcacacagcaaataagtggcagaactgagattcaaaaagcagatggactcaaaaatctgtcaagttaaaacactaaactacacttcctgtagttaaaattacaactcgattcttctgactctgatcctagtttaatattgtttccctcatagcctgtctcctaaatttagtgaggtatgtgttgaaatagaaatctaatacgtattgcatttattttctaatatattatctgttacccctacaagtttaatgttacagaatatagatccatctctagctgtaaaaatatactaatatatattattaagtaattagcaatagtattcattttatcaatatgacatttaatcaattttagtttttataagtcagatgcacatagtttatttcaagaggaaaaaaagtcatctcactgttatattcttgcagaagattgccctgtcctaaaatcaggattatttgtagacaatacaaagcagctaaactagcttctcttagaatttccactgtaggaaataaataacaatatacactaagttaaaaataataatgcccttgttatttataatctaccctcagggaattttaaagcacttttcatgtcgtaacagtcttaaaatgtttccaggatatggattggcaaaccaaagtactgtaaaaagaattgtgattttttttttttcttttagatggaatctcgctttgtcgcccaggctggagtgcagtggcacgatctcggctcactgcaacctccgcttcccgggttcaagcgattctcctgcctcagcctcccaagtagctgggactacaggcacctgccatcatgcccggctaatttttgtacttttagtagagatggggttgcaccatgttgaccaggctggtctcaaactcctgacctcaggtgatccacctgccttggcctcccaaagtgctgggataataggcatgagccaccactcctggcataacagtgatctaaaaatcttctatatggccatgtgctgtggctcacgcctgtaatcccagcactttgggaggccgaggcaggtggatcacaaggtcaggtgttcgagaacagcctggctaccatggcaaaaccctgtctctactaaaaatacaaaaattagccaggtatggttgcaggtgcctgtagtcccagctactcaggaggctgaggcaggagaatcacttgaacccgggaggcggaggttgcagtgagccaagatagtgccactgcactccagcctgggcgacagagtgagactccatctcaaaaaaaaaaaaaaaaaaaaaaactatgtgaagtagctccttgcacacaatagtgacaaaaatatttagcatttattcaaagagctataatttccagaactctttcaattcttaccctaatcctgagaagcaagcagggaagattacattatccccacattaaagttaaggaagaactatgattcataatggatacttgtctcagccaaaatcacagtcaccaagaggcagagccaggattagaaccttggtcttctgactcgtgagtcctatatacttgctactctacttgatctttatttcttatataaaagaatgttcagttaatgtttgacaaatgaacgtatgcaatgcatgagcaaatcacatttcatcagaaagaaatgctgaatttctaaatttcagaccagcattttgccattatataattttttctctgtaactatactttttgtttctgaagaatgaggctgtcccctcaacaagtataattatcctctagaaaagcaaattgtctttgagctgataagctgataaacagctaacacacaaaatcactaaatttttctagataaaaatcacgagttaaaaaaatagatatatcttcttagaaatataccaagaaaaccaaatgctataacttttaaccctagtttatagcatagctaaagaacaattactatataaactagacacagttttggaatgaatgaatgaagactcatttataccaagaaggaagaaaagaatcacaacacagttcacccatgatttcacatctattaagtagaaaatattatcatattctcacaactgtcagcctgtgctgccagacttcacatttagcaattatctcaacgccagctgtccccacaatttcgtttcaaatttaatatgccctagaaaatattacatttcaaaatttctagcaatttgcaaaagatagagacagaagaggcagcctctgtagcaaaggcatgtgtaggctctctgcacactgtgggaacacactggaatcctatagtggacatttgttatgtgccccccaaccctctccaggattattctgggtcttctggtacaactccaaaacctcatttagataacacccctcccccattctcagtccatgtagactggatgaggtctccttactccactcaacaaagccaaaaatgaacataagactgctgatgccaacatcagtgctttctactacattatgcttcatattacagtgacatttattgttttgtctgcctaacacaacattcccttcttatggaatggcaactaatggctatgtgatcaagctgcctgggtttgaaacctgttcccaccacttcctacccatgtgacttgatccatttatttaactgctctaagcctccatttcctcatctgtaaaacaaagattcattcacatattcaacaaatatttattgaacacttattatgatccatgcttgtgcaagtgctgagataagaatagtgaataagatagaaaaggtcaatatcctcatggagctcagatatggcagtaaacaacaataaaccaacaagagaggtgcagattataagcgccataaaagaaataaataatgggagaagatagtaaaagagtgattctagatccacttacatagaatgtgcagaatttcaggataaagaggctttcagtataaagcctctctgaggaggtgacattttagctgaaatataaaaagaaagaataagccaaccactcaaagagaactggaagatcattccaggaagagggaaagccagaggaagaaaagagcttggcacaaaaggacatctagataactgaagcatggcaagtgagaagggggtaaaataacacaagacgacatcagaaagctaaacagaagccagactgtgctgagccttgcaggtatgggaagaaattgagatttcattctaggagcgagcaacggaaatccattgaagtgctttatttaaagctttgtgtttttaaaatgttattccagctactatggaaaggatggatatggaaaagaagagtcatctattcaatatagttaagaggatggatggaagagggaaagaaggaaggaatcagggatgatttctaggttacttgggttgagcagctgtgtatatggtgatctattgattgagactacaaagattaggcaaaagtcagggttcaagaattattacatttgagatgcctatcagatcctcaaaatagctgttatacacttttttttttttttttgagacagagtctcactctgtcatccaggctggaatgcagcggcaccatctcggctcattgcaacctccacctcctgggttaaagcaattctcctgtctcagcctcccaagcagctgggactacaggcatgcaccaccacgcccggctaattgttgttgttgttgttgctgttgttgtttttagagacagggttcgccatgttagccaggctggtctcaaactcttgacctcaagtgatccaccctcctcggcctcccaaaatgctgggacatgagccaccatgcccagccctgtgatacatattaaatgaaataatctatgtaaaaagcacaatgcctaatgcagagtaaacattcaataaatgttagctattattcatgttttgagaaaaagaggaaagttccttccttggtctacccatgtggttttggtaatgactgatgactttatcttatcccatgacccagctagggcattggacaactaactggtctagatgaaaccaacaagaatcacactctcttagctgtggtgattggtccatcactcaagccacaccaacttaagttcttccctatgattttcaaactagaagctgaaagggaagttccccttcctcttcagtagggaccctgtaagagtccagggatgctgatggtaaagttcctacttctaggagaaatgccctctgtaattggagggaataaggctgatacccagagagaagcacagatgagagacagagtactagaggcagagagtgcttatttctagtaattctagggtagtgctgtccaatagaagcataatacaagccacatatgaaacactaaaaatagacaggtaaagttaattttaataatacattgtatttaaaccaatgtatccaaaatagtatcatggtaatatgcactcaatatacaaagttgccaaataagaatgatacaatggactttggggactccggaggaaaaatgggagggggggagagggataaaagactatgaatgtggtgcagtgtatactgctcgggcgatgggtgcaccaaaacctcacagatcacactaaagagcttactcatataacctaataccacctgtaccacaataacttatagaaaaattaaaaataaaaaaaaataaaaagttgccaagtgttcaaaacccagtgtgtatggtaaatttgaactcagactagccatatttcaagtgatcaagagcgatatatgactagtggctactgtgttggatagcactaccaacactacctgggctctacccaggccctttgcaggccataagccaatgcatgcccttgtaggatttcattaatttaagttggatttgtgtctcttatcccgagagtccttaatttacctaaaaacattatttcacttattccatttacatctgaaaccctaataattctttttttttttttttagatggattcttgctctgtcacccaggctggagtgcaatggcatgatctcagctcactgcaacctccacctcctggattcaagataatctcctgcctcagcctcccaagtagctgggattacaggcatgtgccaccatgcctcagtaatttttgtatttttagtagaagaggggtttcaccatgttggccatgctggtctcaaatgcctgacctcaggtgatccgcctgcctcagcctcccacactgctgggattacagacatgagccactgtgcccagcctaatcatttttttagaaatcacacacagtacattatattctgaaaattgattcaccaattcttattagcataaggactatcacctatttccctacttgagtgccaactcccacttcacatatgcactacagttaagactcattagacctctgtattccagccttgattagcacaagaaaccataatggagcatctgcaaacaagaatcaaaggtactacaagtgataactctgattgagttgatctgaggtggaatctgggactccatttttttaaatgttgtcctagtaattttgataatcacccagattcaaaactaccgagttggatcacttactaaatctaaatagcaacttctgccccttatttaccttttctattgttacaagtatttcctctgttgtatttactgaagcgcatactatattcacctttgtatacttaattcctaaccccttaatggatatacttcaaatattcaataaatatttgttgaactaaaagaaaaacttaaagtggacttttaatatgatgctatttccaatatgatatctaaaatagtccagagaagtagtgggagataataagagtactaagtttaggtaatggcctatctctccttctttctgttctaattttaattagctctctgctagtctgaattgagggtaaagggagttaattgttggattactctgactacagttacattaaaaagaaagtgccctgtggccatattaagtgccatgttgtacccaaatgtccacctgtagttagataattttgatttaattgacttcactcacatccagagaccatggaagggagtggaagtttggtcaattaaaaatcaagcattaagaatgccaactgattcctcctgagtgagaattagagaaaaggaattctaggtctgtgggcacagggaaagacataccaaagcattcataaatggctcttggttcctcacctccttcttctcttccacacacacattctaggaggttcaataaagtgctgtaatgtgttttgcacacagaaggtactcaacaaagttgtatcagttgctggggccataaccaagtattacaggctgggaggcttaaacaacagaaatttgttttctcacaattctaaaggccagaagtctgagatcaaagcattcgagtggttagttcttgctgaggcctctcaatctggcatgcagatagctgctttcttcctgagtcttcacagggttttccctctgtgtttgtcaatgtcctaatctcctcttcttatagagataccagtcatattggattagagcccaccctaataaccccattttaacttaattacctctttaaagaccctgtctccaaatacagtcacattataaggtagatggggttaggagagcaacatatgaatttaagaagacataattcagcccataacaagtaccgtctaggtaaccactctaacagaggttagatgaatccaagaatagctgaatcttgaagaggtcatatagagttatttggtttcagggatatgttaaacatgaaagatctaaaccagcggtttcaaacactactgttcaacagaatcgattatggggtatgttacaaattatgggtgttctggccacactcagaaattcttaggagtagaccaggcatctgtatgtttgcagcctggaacaaagtctggtattgaccctaaaagacatgtcaacctagacagccagcaatgaggcaagaagcaggactggcaatgaagaggaaaagacctcacgtgaataatgtagtgatctgtatcgctacattctcttcatcattaagtctctgttacccaaaattcactctaataccatattactctctttgtgactttgtccaaacaaagtcttcccaaagacgtaatgcacaatgagaagtctatgcttatgatatttttcagaggagggctggttagaatcacaaatgatgatcatttacttcacacctaatataactcattctccgctgaacggaatttggttgattgactgatttgtttaggccaatggattcaaggaagtgggccatattcatctcatcttcttctcctttaagctgcctctgggacaagttgacacacattttcaccactctctagtctcatggttgattaataatatccgtataattatatttcatcctatcattaaacagtactggattcaaagtaaaactcagtgaaataatttggcacaactgcttttaaaaattatatttttgtattttctccttcatatgcttctttattctatctctgccttccattcaacaaatatttattgtagtgccgggagtatgggaatataacaataaataaaacatagcctctgcccttcagaaaagtaaagtctagaaaagaaaaaaagatgtgtaaacaaataaccacaagagaatgtgccatattataacaaagatacacataaggtcccatggagcacagagtagagaactaacattgcctgaaggcagagcttacacacaaactgaaggatacagtcaagtatccaggcaaggacacaggacaagaacaggcattaaagcaagaaaatgcaaggcaagtttagggaacagaaaatactcatgatggctctaacaaaaggcttgtaaggttgggactcatggtgggccttccatgctacactaaataaccagcactgtcaggggaagtcactgatagttttttaagcaccatcagttctgtgtttaatttcccccaggcataaaattttcctgaggctgtctgctgctccccactccccagcgtgcgcccctcttccacagccccatgccgcctgtgctgtagcaatcagaagtacttactgttctctaaatatgccaggcatgttctcactgactgctaatgtcaaaagcatgacttgaaaaacatctaaatgcatgatcagaccagtgatagcaaccctatggtggagttttcaacagttaataaggggagcaatattgaatcattccagttctctatattttgtcatttgctgttcctgctgcttcatggaaaagggttatattttctctgtaaatagaacttgatatatcttcataaccgtcagcagggatggacactgtgctacttcccagcaaaaggtgaatgaaaagtgatagcagttaaaatggtgttctttgctgtttctctgttttgttttcatactcttcttttaaaatcagactgtaattttaacaaggtggcaggtaaagcattcctttttgcttttaatgctgcctggaaataatttgttttctcctctccagagaaattcttaaaaaaaaaaaaaaaaaaaaaaaaaactgtaaaaacctgactgttctgatacaaaccttgttaataggatgttcaccttaaaactaacccaaaagaggaacaagtaaagcaacatgataacaaatcacagaattttagaaaggactaagagcaaatgtagtggtgtggttaaaagctatggttcctttgaagctcaaattaagaagaacctgctagtactgatcatctagcatcctaagtgggaacatagcaaatagacatagaattataaccctaagagttgaaatcagaataatagcaccaatgaactcctcaaatcattttttaaaggaatatatttgtgaggcaatgcaagtgaaaattacataatatacagttactaaattcctgagagttctatttttgtttattcaatatctactaatataaggacaaaaatcattgctaatgatcaaaagagcatagcaatcattatcaaattaagaggccaggcatggtggctcatacctgtaatcccagcaatttgggaggctgaggctggcagatcgcttgagctcaaaagttggagaccagccagggcaacatagtaaaacccatctctacaaaaaaatataaaaattagccaggcgtggtgatgtgcacccattgtcccagctacttgagagtctgaggtgagagaatcacccaagcccggggaagtcaaggctgaagtgaaccatgatcacgccactgcactccagcctgagcgacagaaagaaaccctctccaaaagaaaagaaagaaaaattaattaagatgtgattcaatacattttttccaattctttaagttattaagaagccaatgtcaatctctcatccactgcaggaatctcctagtttccctaatatacaacttcggtctctgctgaaatattaccttttttatcgtaaatacttaaggtatacaacatgatgttttgttatacatatacatagtgaaatcattatcacagtcaaacaaattaacatatctgtcatctcagataccttttttccccctttggtgataatctactctcttagcaaatttctagtatacgatgtgatatcattctgtacattggatctctagacatgctgtacattggatctctagacattcatgctacataattacaactttgtaccttttgacatacatctccccattcctgtccctccctccccaccccaggccctagtaaccaccattctactctgtgtctatatattcaactttttttttagattctgcacataagtgagatcatgcagtgtttttctttctgtgcctggctttttcactcaggatactgtcctccaggtttatccatgttctctcaaatagcaagatctccttttttaaggctggacaatattccatcgtgtgtgtgtgtgtgtgtgtgtgtgtgtgtgtgtgtgtgtgtgtgtgtgtaccaccatttctctatccattcatccatcaacaaatgcctaggttgtttccattctggaccatggtagatactgctgcaataaacatgggagctcagatatcttgacaaggtgctgacttcatttccgttggatacatacccacaagagggactgattgctgagttatattgtagtcttatttttaattttttgaggaacctccactcagttttccatagtggctgcactaatttacatacaaaagtttcctttcctccacagtctcaccaacacatctctttttggtttatttctgaactctctattttattccatctgtctatgtgtctgtttttatgccagtaccatactatttttccatattataactttgtaatatagtttgaaatcaggaagtgtgatgcctcaaactttgtttttctttctcaagattgctttgcctatttggggtcttttatgtttccatacaaatattttctatttctgtaaaatattacctttgcctcttcttttcctttcttcccatgtcatagttccctttctttttcttccctcttctctctatgcttctcattctagatcacatttgggtaatgttaggtacatgtatatagtgactatttctcctggaagatgatttagactacaactacaactataatcacttagaaaagtgtagaattcctctgtccacctagaatagagctgaatttgttcatattccattccaaacacagcattctaggaaactatgaagtattctgcaagctgtaaaaagatccatataatagaatattatttgccattaaaaaggaataaagggccagacgtggtggctcacgcctgtaatcccagcactttgggaggctgaggtcaggagttcaagaacagcctggccaacatggggaaaccccttctctactaaaaatacaaaaattagctgggcatggtgccccgtgcctgtaatcccagctacttgggaagctgaggcaggagaactgcttgaaccagggaggcggaggtcgcagtgagccgagatcgcaccactgcattccagcctgggctacagggcaagactccatctcaaaaaaaaaaaaaaaaaaaaaaagaggaataaagtacagatacatgcaataacatgggtgaattctgaaaacatgctaagtgaaagaagacagtcatataggccacacattgtatgattccacttatatgaattgtacagaataggcaaatctattgaaacagaaagtagattagtaattgtctacactggggagatgggaggaatgggaagtgactgctaataagtacagtggcttctttttagagcgatgaacatattctaaaattagactgtggtagtggtttcacaactctgttaatatattaaaaaccatccaattaaaaactttaaataggtgaacattatgagaattatatctcaataaagctgtttaaaaacatgtatctaacgcaacagtctatgtgtacacacccataatatatgcatatatatacatactcatttacagagagttctgaattatcagcctgcagtttatccactgaaattttaaaattcaaaatttcttacttccttgattgtatgagaatggtaataataacaataatgacagcaataataatatcaagtactcatttagttcatactatgtgccagctattgtgctaaaaatacgtaatcttattaaaaccttacaaagtcaccaaataatagagtctgttactaaccattttaacatattattttttataatcctcacaacaagaactacagtttttctcaatttatgagaaaactgagatttagggtggtgaaataaatcattctcggttttacagctagtagttggcagagcaatgatttaaactccggtcactgcactctgctgccacttgagctatccctctgtaagggcaattgagtctcagtgagctaaaagaatcttacattacttttgcagacaggcatctaacagagtaggaaaaatcccagaaccaaaagctgaaacccagaccgcagtctgagtcatgatacaaactaaccaggccagccaaattccaatcctctcatctacaaacatggaaattggaatagaaatttttcaaggtcctatcagcttaaaagtccatttgtccaagaaaaacttacttaaaaatctgagtcttcagtccaaaataaacttgccagaagaaatgctttctttattttctgccctatgagtttacgactattattaggttgtaaaaatattaagtataactggaaactgaaagcataattaacatttacttataaagttcgatatcacccattagcaatataacacataatgatttattaactttttactataaaaacttttaaacatattcaaaagtagacagaatagtattaaaaaacccaacgtactcatcatacacctttaaaaatcgtcaactcatggtcaaatttgttccatctatataccctcccactttgaagaaaatccatggcatcataacatttctgtaaatatttcagtatccatgtgtaaaagataagggttcccttcttaaaagtataatcatgataccatcatgacacctaaaaatattaacaataatatcttaatatgacaaacttggaaaatacatttagatatataaatggcaataaataatacagatttaagtaccactttcactgatattaaaagataaacctaggcacattaaaattttaaagagtttatttgagcattcagtgattcatgaattaggcagcaccagactgcaagtgatttgggctccaccaaaggcgtgcaagggaaaacttttataaggtgtctgtggaagcaggacagagaaaatgtttgatttattaaagtggagagtccctacttagaggtaattggcagtgtctggtaaagactctagatagagattcactggtgctttctgatttgttaaacttaagtttcatttcactgttttacagtgtgtttactgtttacagtgagtttggtttcagtttgcttacataggaacccaaagcactacctaatggtttcccaatcaatttttttttttttttgagacagagtctcactctgttgcccaggctggagtgcagtggcataatctccactcactgcaacctctgcctcccgggttcaagtgattctcatgcctcagcctcccaagtagctgggattacaggcacacaccaccacgcctggctaatttttatatttttagtagagacagggtttcaccgtgttggccaggctggtctggaactcccggccttaagcaatctgcccgtttcagcctcccaaagtactgggattacaggcgtgagccactgcacctggccccagttaatttttttaacactgacaaattttactttgagtgttaaggctatctgtatattcaaattttccagactattatttctatttgaatacattatttatatatataatctattatatctatacctaatgtctctgtactctattcatgaaatgtcatatggcactatactgaatgtgtccatagaagtagagtactaaacattctatatatactgagcttattagttttgtttactcattgagcttgcctggtattgaaaagaaattaaattagttaggcatggtttgtttgtgattaacctttcctgtcttccacagttcaatttatcatcctcttcgtgataccaaatgactactttatgaattgttccacaaatttgccagctattattcacgagctacatattttatccaactgaagtgtttattctgtgacccttattttcatataactctctataaccattttgcttctaccatacttactctcacattccttccctagcttgccttgccctccaaaacaaaaaagcttccaccatgaaattactaattgatattctgccttataaactttgccttgaaagattcctttgaaaaattaatttcatttcctcgatctagccaatgataaaataatgatgacagcaaacagaagtagaaacagcataattttttaaaaaaggaaacatcaaattttgtattgaaaatttacatcagcatttcactagtgaacagacatttcctctgagaaagagtgataattaccatttgcacctcatgtaaggattttcctgaggcctaagaaagctataaataatatagtttcttttgaaataaagaaaaaaaatttaattttctttcatcacgctaacaagaagtaaaataggttgcaaataatggtgtagtaaatggattaaagagattagcttcaaaataactgcactgcaggacctaaatgctgaacttgggttatccaggctaaataaaggccagtcatcatcttatttttatagttcaatcataagttagggcttatgggagtaacgcaattaagaaaatatatatatttgggggagttggaaaagtttggaaaatttcaaaaatcaaatcacatttcaaatggattaggagaactcactaattaaaggtggatagatttcatactgttaaaaaaaaaactcaaacaagtaaaaaaaaatttatgattaaccaccaatacaaacaataggcaaatttattagtttctctgctcttgctttacaactgtaacctttataacaaaccctgttagaccttgtaggagaccctgttaatgcccacaccatatccccctgacttgtctgtgagttctcttccactgctgtggatagtcatgctgatgctgacagcttcccacctaaaggacccacagttctttctccattttctctttattcttcctggaaccaccttgcacatacactacccatgcctaagtccttacaccagggtctgcttttggggaaaaccctaataagactgttggtaatagaaatagcactagaaagcagaccttcagaatgagattctggaattgcattacttgctggtcagagggcagcaaggatccaatttctagtgataagtgagtggtgataacccctaacaggctacagcagtataatgcccaaaatttttaactgaggtggactgtaatgtgttacaggaaggaggaagtacaagcttatataatagctctaatacttgaaagacatgtggtaatcaaaacaaagattttggagtatgtgttaactactcgagaagctttgaagaatgagaatggcaggcttgggtaagccatctatcaattcagggcatgctgtaaaagtcagaaaaactccatgtcagtatttaaaatgaaccttatctctggcactcagctaacatactatactgaaatcaggcctaagatttgatgaaggagcttagctacaaagacaactaaatgcacagccccagcaggtctcccatcagggctctgatagggaaagggggagggtggtgatgcatgggagggtgatatttaggggggtgtacatgagaccactaaacactcaaatctgctgaaacctctgggccggcagaatccaccctcatccctttcataaaggtaagccacctctaattgcatggagacctggcaaaggacatacctgacgggggtgccttcctccagatctgcccttcatctttcattgcctctagaccagtaactagggtcaggtcctactgataaaagctccaactgtaaggcgcagtggctcacacctgtaatcccagcactttggtaggctgaggcgggtggatcacctgagatcaggagttcaagaccaacttgaccaacatggtgaaacctcatctctactaaaaatacaaaattatctgggcatggtgatgcatgcctgtaatcctagctacttgggaggctgaggcaagagaatcacttgaactcgcgaggcggaggttgcagtgagctgaggtcgcaccattgcactccagcatgggcaacaagaacaaaaagctgtctcaaaaaaaaaaaaaaaaaagctccaactgtgaagggcacaccttcacattggtgggaagaatatgggaagaaatcacctattcaccgaaaaagtcagctgagcctatctgacatgtgtcattagaactgagagcacacataaggacgtggatgttgagggtgctgagctgaggcatggggaaagaatgctagatagaggagagtgctttcatatggaggcaatctctggtgattcataatttaatttgtagcaaggaaatcataagtaggtcctaaaacactaatgggatgtcaatgtgactgacaggattccaaaataacaggcatcagaggtggcacttagccatcagaagcaaggtgaatgcacgccattaaaggtagtaaggtcagagcagtaaccagagagcttgacctgcaggggtctgtggcaatggttgataagtcattagccattttgtttatagaagcaaaagagatgggtaatgtatttgttgctagggctgctgtcacgaactaagtgacttaaacaagagaaatttaccgtctcacagttttgaaggccagaagtccaagatcaagacattgttggttccttttaagggctgggtgaatctgttccatgactctctcctatcttctggtggttttctggcattctgttgcgttcattaacttatagaagcatcaccccaatctctgccttcatcttcacatgacattctccttgtgtacatttctgtgtcaatattttctttttgataagaataccagccacattggattaggggcacaacctaccccagtatgatctcatggttactcattacacaattcaacctatgacaagtagttaataaggttaattttttatttatatttgcaaagaagaccaagaactaaacagaagatcgatgttccttttctggatctaaggcagttctcagacccagagcccatcaaggggaggctaagtcctcttgagcgaaagagctaatgtttctccaataattctttaaggggaagtgctgccatataacagagtatatggcaccatatgccagtatatacactggtgaaagtggaatacccaaacctttcagggctattggatataggctctaagctgacacttataccagggtatccaaaatagctttgtggtctcccagttagagtaagagcatttggaagccagataataaatggagccctgactcaagtccatctcaccatcagcccaatgggtctccagacccaccaactggtcacgtacctggtccctgagtacataattgagatggatatacttagaagcagctagaatccaaacactggttctctgaactatgaaacaagagccattataatagaaagggacaaagaaagcccctggtatcacttctgctctgtccctggcccaaataataaatcagaaagaatattttggccaggtggaataacaatttgtgccaccctcagaatgcttcctgcaaaaaaaccatacggctcatggatgagtcagctaaatacgttggtgcaagaggaaaactactgtcacactatagcccaaggcaaggatgaactactgcaatgttactcaaagtgtaatccatagactagtgccaattcataaatttatttttgtaagtcgacaaaataattattaaaagtgagagtacatatttggaaacattagagcaatttgacattgctgtaataactgtagttttatattttacaaaaagatcactcatgttgaactgaaaacaaacccatatatagttccttcacatgatcagtttgagtagcactgttctaaaggacagtggtgaaaggaaatccatcaggcagagcttcataactttacatgaagaaagaagtggtttgaggtgagaacaatatcaattgttgggcaggggctagtggttctgctaattgatcagatgcctggaagaagcaatacttcatgatcagatacaaggaggtctgagaaggaggcatgtggatgaccctataggtgtgaatacctaacaaagcatctatagtagaggcagcattgaacaaccagatggaaaagatgacccatccaatgaatgtcagccaatctttgtcctcagccatcacaatggttgcacagtggacatggaaactgactagccataatgtcagggatggaggctatgcatgggcataaaagcatatactccctctcaccaagggtaatctagctattgacagtgctgaatgtctgaccaataagtactggcccaaagtggcccctcaatacagaaccatccctcaaaaaagccaatcagacatttgtggcaggttgattacatcaaattcctttccaccttggaaggcacagcaattcatcctcaatgggcctgatggttattcaaacatgcttttgccttttttgcctctgccaggtcatatttactagcataggatccaccagtctcaccttttatggccattctagcactccatcaagctgatgaaccactagcattccatcaagctgatggccaaaaggctcagctttagaataactgtctaaaggattggtgccccatcctcttaaacagaggtccccaatctccagcctgcagagaggtaactctccatggcctgtgaggaaccaggctgcacagcaggaggtgagcagcaaggaagcaagcattatcgcctgagcgctgtctcttgacagatcaggagtggcattagattctcataggaggtgaactctactgtgaactatgcatgcaagggctctaggttgcatgctccttatgagaatctaatgcctaaggcagaacaatttcatcctgaaaccaaccactctccccatcccagcctcccacctctgtccatggaaaaattgacttccacaaaagcagtctctggtgccaaaaaggttggaactgctgctctacagcgcagtagatgagtcaaaccaatgatcattacacgatgttctgtccccttagcatgggtgtgggaactaaggggtagaagtagaattggcagcactcaccacttaacccacttgggaaatttgtccatcctcagtagccaagttgggtaatttgtacttcccgttctctcaacttcagactctgtgggatgtgataccttaacccctatgagtggaacactttcaccagagagtaaattactttcacccaaaccctttattttggtgcctgatttaaaagagaatctgagttaactttaacacagttagatacaattattatcaccttatattgaggaatgaggcacgaggaagtttaagtggaccagggtcacacagctagtaagtgatagaatcagaacttgaccctgggcagtctcatctagagtccttgctttcaacctctactctaaattatctgtttttaaagttcatgtttttgtatttagttgtcttggagcaaagcattcctatattattttatgtttctaaggcaggtgtggctagcacctctataattaaaataaagttcaattaaatctgaacaagtattatttaatatagttttttattattttaatacaggtttcaatgtaatcagacagtaacaatgtctagctctgtcttcatttagcatgtatctataaacacgctccttaaaaacatacctaaacacacacacaaaaaaagatgtctttataacaaattttcacaagttatgcatttttgaacaacagttaacaggataagttcaaggtaacagttgccagtgattttcatccctaggaagtaggtaaatcaaccaggctaggagttttcaaaaataaacataaactcctttgtactagctaatccttatcatttagcatcacctgtccttcagctggccctatgcttgaggcatcagaatgaagccctgggaactagtattcaaatcacaattattttaaagtttacaatgggcaatttcctaaaagtgatatgatagaaagagtatgaattctggagtcagacaatcccagttttgcaacttacctgctatgtggcctaggacaagttatttaacttttggatcttcagttttccaatatatagaatgtggaagaaaaaaagattgaagtatgcaaagtgcctagtgtaccatctagcatccagcagctacttaataagtaatagtttccttcttcataggtattattaattaattcatgtttacataattacttgcaactaaaataaacaataaataatgtagaaaatcctaagggtcttataagtttagatggaaataaattggaagcttgcataaacagattaaaacacagattcacaagaagaggaaataacaataatagattagaaagcaggtagacccagccataggaaagaaaacttaaatactactcagcaatatctccaggataccatcagaactgttttggtcaccccataggggtagacatggatatccactgctataattttgcactgtactaacatggtagcctctagccacaggtggcaaattgagcacttgaaatatagctagcccaaattgaaatgtgctgcagagttaaaaaaaaaaaaaaacctggatttcaaaaacttggcatgaaaaaatatataaaatatctcattaaaaatgtttagattgattacatattgaaataatatttggatttattgtgttaaagaaaacattgttagatttaacttcatttccctctttttactttctttatggtggccactagaaattttaaatttacataagtggtttgcattttatttccactggacagcactaatgtgaggtcctaatttaacttgaacagcactgatgtagagtcctcattcttaggctcccatgttcttccctcccagtcttccattctttagcaaagacttagcactacagtaacaacaattttcattcatgtccctgtatgagggccccactatcctggatgcaacacacggatgatttgccacaaatagtctttaaatgatttataaaatatataggaatgaataagcggataaataactcccagcgaaaaatgtccctcaaggacaatattcacataggcaagactctgtggtactttctaacacactttaaaaggaacattattttaatatgcactatccattcacgacattcaagacaagtgaaggttagctgtctactagaaaaaataaaattttaaacttgaggcatttattcatataatcaagagtctaggaaaactgcctgaattagtcaaggttctccagaggacaaaaaaaaaaatgcatatatacatatatggagatttattggagaactgactcacaagattatggagactgaaaagtccaccaatgattaattcattcattcatactttacatagtttaaaagtccctggcatcaagcagggtacccaggaaagccggtggtgcgattcagaccaaatctaaaggcctgagaactagggaggctgctggtgtaaatctcagagtccaaaggagttcaaaggcctaaaggaggcgctccatgtccaaaggcaggagaagatgtcccagctcaagaacagaacaaatttgcccttcctccactttcttgttctattcaggccctcgaagccagactgaatgacactcacccacatgggtgaggacaatcttctttactcagtcaactaagtcacatgttaatctcttccagaaacacactcaacagacagacctagaaataatgttttaccacttatctggtcattctttagtccagtcaagtttgacacataaaattagccatcacaccacctcaatcctctacacaaatttggctgaaactagcttgataagtctttctatcagaggcttcagtggaaaaactgaccaggtgatatggtttggctctgcatccccacccaaatctcatctcaaattgtaatccccatgtgtcgaggaaggacctgtaatccccatctgtcaacagaggaaggtgattggatcatgggggtggtttcccccatgctgttctcatgatagtgagtgagttctcatgagatctgatgcttttataaggggctcttccccctttgctttctctgtctctcctgccgccttgtgaagaaggtgcctgcttccccttccatcatgactgtaagtttcttgaggcctctccagccatgcagaactgtgagtcaattaaacgtcttccttttataaattacccagtctcagggaagttatttacagcagtgtgaaaatggattaatataccaggcaactccacagactctgggtatcttcttcaagtgtttcacaaatacagtttcccaatctttacagaacatgagactccaaaaataaccaaattctcacttcccctgctcacactccccccaaaaaatctactcaccacaaacaaagcaatctaatctgatagtagaaaaatcaaaattaatgaacagaaaaaaatctgttttggagataaaaaccagagaaccactggagaagatgacataaacagtgaaagatcacaggatggcttttcatcttcataactctgccattagtaaacaacacacactaatattttgcttctatgaaaatctcctgtataaattttcaaggaaaaattagtaatataaaaatatgaaaaatataaacttttttttttacttcgaaagtttttaatctcttagacaagtataattacagcaagcacttttctacaagtaactttaagctaatggacatataatggataacaataagcatcctagagtcaagttacctgggttcaagtgccagctctgccacttaggtgctgtgtgaccttgagaaaatcccttaacctttccctgctcagtttcctcctctataaaatgtggataatagcagctacctgagggagttgttataattaaatacattaacatataaagcatttaaaacagtgcctgacacatagcaaaatctaaataagtggtacttattattacaaatgaccaaaaattaagtgacagtaattggtacatctaatctcacctaaatgtcttttcatttaattgatgactgttctcctcactaaggacttctttaattcttccaacaggtgataaattgttactaggtttaagagccaaaggatacatattaaattttttgcaagactcaataaatatggttttatagcactaaacacttctaacaagagtaggaaaaaaaacatttcaggaaaaacgttttgtattaagaataggaaagtcaacagattgataccattaataccaatggacataatacttaaggcccaaaccacaccatattccactagcatttactaagtgtcaattgtgtgactggtgtttccaagatactggacatacaaagaagacaaggactctatccttaagggctcagggtgagtatacaggcaatacacaattatgttatgatgtaaactatggtttgaatgtgtcccccgaagttcatgtgttgggaacttaatccccaatgcaatagtgttgagaggtgagaaattcaagaggtgattagggtatgaaggctctgcccttctgaatggattaatgacattaaggtaggaatgggttactcataaaaagaataagttcagcccctcttaccccttttaacttccaccatgagataacacagcatgaaggccctcaccagatgccaccccttgaccttggacctctcagcctccagaactataaaaaaaaaaaaattcttttccttataaattacttaatctgtggcattctgctatagcaacatgaaatggactaagacaatgtattataacagaagtatgagcaaagtgcattacaggcaaaagaagaaatctgaacaaagccaaagaagcatgaaactgcatagcatatttggggaatggtaactcacctaatatggcttcagcattccatcaagaccttacattgctcttgttttttcaaacattaactacctgtcatgtgcaaggcaccaaagaaacagacatgtaatccatagcctctgggaaggtaatatctgtttcaggtgctaatgtataaatagaagttagctgcaagaacaaaggagtaagagcattctaggaaggagaaatggcatatgcaaaggcattctgagaaccaggaagagtttaacaagtctaaatccacgggaggatcccaagataaaggcagaggtgggatcattagatgttttggatgccaggcttttataacaaaagtgactagtaatcactaaaggatttaaaataagatcatgaccagatctgtgttttaacaaagcccttctgatagaaggccagtaaggagtaatccaggaggtaaaagggataaggaaatagcattagtgatggtgacagaaaaaaaggaaagaacatattcaagagggtcttcgatgagaaaatttggtaaaagtaaggaagaaggagattccttggatggtgccttgagttttttcctaatccctctatccccctagtagaaacatcttctcctttgaacctattttatttctacgttagtggacttttaggggggtacctatttattcatgtctccctcctcctactggtaaactcattatgggcagagactgtgccttatcccccttatattcttagcaggaccagaactagggtgaggagagtgaggcattcaacttcaggttcatgctggtacaaggttgaaatctgtttctatttaaaattttcatattttgttcatcacagactttttgcatacattttgattttttaaacattaaattaaaatattgtatattatttaatactttggcacactcttaaattttatacctgtggcaagtacctcacttacccctagtcaaagacctgatactcagtgtcttcctgacatagtacctaacacaagcaggtacttaaatgcatgttgaatgaaggaaaagcaaacaagtggcataagcaacaagatggatggtggtgggccttttacagagacagtgaatacaggaagagcaaaagactctagaggaacatgagtttataatgcatgtcagaagcactgcttggtgtattacagattaatttattattcaacactggaagcatgtataatggaaatattaaaggatgacattactcaaggaattgttctcaagatatttccccattctctttttaaaacttacactaatatttgaggtattgcagcaatatctaatttcttagttcagcttttaagttaacatttcttaggatgccaagatgagatgcttgttacatatatgtaccattaacactgctatggtatgaatgtttgtgttcccccaaaattcatatgttgaaatcctaatccccaagataatggtattaagaggtggaaccttttgggaagtaatcatgtcatgacagcaaagccctcacgaatggcattagcacctttattataaaggcccccgaaaaatgacttgcatcttccactatttgaggacacagctagaaagcaccatttaagaatcagagagagggccctaccagacacttcccaatctccagaagtctgagaaatgaattgtttataagccactcagtcaatggtatcttattatagctgcccaaatagactaaagacaaacacagtctttgatatgacttcatcaaacggcacccacatcactctatttctgtatccttgctcacttttcttcatagcatttatcactactagatgcagtataagttagttatttttcttccccctttaaaaaagattcactccatgagaacacagaatttttctgttttgttcatagttgtatccccagcacctagaataaatgccattgaaggtcatgacaaagagtgcgagggtggctgggggctggcttacactggagcagaaataagacaaaaaaaataaattaaaccctctgtggatacaaaactagagctaggcgctcacaagaatttaacagaaagccctaggagccaaaaacaaagatgcaattgcaaaccagagcaataagcttgggagcttacctgtagtcaccttgggaagtaaccagtgggcttgggtttaatagcctttggccagatgagattcaaatctctggataaagctgataccctcaaaggattacatacttggctatcactggcataccagaagataaaaggaaacttgcatttctcagcctgggctccgggaagaataaaaaagtctccctgagaattcttaaatatgacctagcctcctatctttggggctttaaatttataccacccagatggtcttggactcccaagccaagaaagtatatagtggttctgggtgtgatagttatcaatgtattttctcacagctcccaatgcacccttctttgtcttgctttatatattggagctggaccctacgagcattttcctttgacttctggctcaatgttaagcttcgtcaaaaggagggacaaggctgatcagcccattgaaaaaaaggtaagtgattccaaacaaactagttttacttattaaatataataaaacataaaatatttgtttctgaaaacctaacagaaagttaatacatagaattgtcatccaatatgaacatttccaatggtagggctggccttaagtcaagcttaatttttcatatactgaaacattacccatctaacatttgaacagattttttatctgattctcatctaactcaatagctgttatctttgaagatttatagcctcacacctaaatggatagcttttaagtagttttttaggccagtgggccccagattcatttatcataagattggttgcctatatatcccatttcacattccaaatatcttcccattttatagaatgataaagggttatatgcattttggatatagtaagaatgaaaatcattgagaaaaacctgggttgccaatttatatatttaatgcttatcagttaaactttaacttgctctatagtaactttaacttgcttatattaggactgcaaagtacaaaacatactccaacccagattctagcaagtaccaccttgcgaaggttaattttatctgtcaatttaaggtccccagatacttagtcaaacattatttggtgaaggtgtttaaatcggtagactgagtaaagcaggctgccctccctaacatggtaagcctcatccaattagttgaaagtctggatagaacaaaaaagttgaccttctcttgaataagaaaaaattcttccagcccaactgcctttaaaatgggatatcagttttttcctgccttctgacttgaactgaaacatcagctcttcctgggtctcaggcctgctggtcttcagaatggaaccacatcgctggctctcctggatctccagcttgcagatcttgcatcctgcaggtcttggaacttgtcagcctccataatcacacaagccaattccttataataaatgcctttatatacatatgcacatatcctattggctctgtttctctggagaaccctaatacacactgcaaatgacctcttattaactcctgctaaagcatcccgcctaaatagctacaaatgttccagacctttccctttctcctctcatttcaaaaggtaaaagtattgtgtttactatcttgtcttctcattgtccccattcccccatgctactaccttgtggaaacacattcctaccccacctctgtaattctgtggttagaacatgagctttgaaatcctgcctaccctctggattacagttgtttggctggatatcctccaagctgagccaatcagaagccataaatgtaaattagatttttgaaatttgtatttagaaactgaaagagagttgattgaagtccctctctgccaacaaccatgtgtgggagttaggcctaagaaaatgaaggagacacactgaaacagaggtaaaagctgaaagaaaaaaaaatagcatcctactgatacctaattccctcatttatacctgaagcttagcctcaccctgtctttccctgacccctttacagtagtcaataaattcccttttggcctaaactggtttgaattaggtttcagtcagtcacaactagagaagacacagtaaattcctactgcatgtaaatcattacagaaatctgtgaattatattaaaaataaccaaacttagttattcaaatgttttctaaaatctgtttgccataaattgatattattcaaaaatatatatatgttccatatttgtcctagaaacattaacattgaagctacttaaaatgcaaagattgcctaggaagaatgtctctttgcttgtttttacaagggacttatcaaattagaaagcaaaattagaaatcataatgagttccatgttctctggtgaacactatgaggtaccattaaaaatgttatataaaccaggagcagcggctcacacctgtaataccagcactttgggaagctaaggcaggaggatcacttgggcccaggagtttgagactgcagtgacttatgatggcaccactgcactctagcctgggcaacacagtgataccccatctctttaaaagaaaaaaaagaagaagaaacaagaatatgctgctttaagtttgtactatttttataaattaattttaattttaaaaaacactttaactgctatataaaaataatactataactaaaaatattgtaatctgaatctttaaggaaaaccatacaaatttactaaatgaggttatcattaccaaatatcttcttggcacttttaagttttaaattgagtgttttcttagctggttgaaggctgaaattcattatcttcttatagaactcttgttatatagaaaacacttaattatgaagtagttattcatacacatgaaagataaactggtcctgaatttcctcctcaataatataaatgttatcctaagaaacaggaaaaaaatggtggcttgggtaattaaaattcagagataaacacaatcttcagtacccaaattcaattgaattcaaagtcttcaaccacctattattttattttattttattttttttttttttttttgagacggagtctcgctctgtcgcccaggccggactgcggactgcagtggcgcaatctcggctcactgcaagctccgcttcccgggttcacgccattctcctgcctcagcctcccgagtagctgggactacaggcgcccgccaccgcgcccggctaattttttgtatttttagtagagacggggtttcaccttgttagccaggatggtctcgatctcctgacctcatgatccacccgcctcggcctcccaaagtgctgggattacaggcgtgagccaccgcgcctggcctcacctattattttataaagctgctgacaaatattaaagttttaatagttgttttctctaatttgattgcccttatagattttcctgaatgatgtgctaagtagcataattgtgaataagcagaaagtaagagagaatataaaaagctaacacacatatacacttcaaaaacaaacttgatgagaacttagtcacaaagggtataaaccctctcaggatcgtaactccaggtgacttttctttttcactcttactaattttaccaactacgaaagggaatcagataatcctagaataggtaagagaggaaaagcaggcttggaagtgatcaacagactctatataaggccactaaaggaactagggagtgataagtaaactagttagtagaagtattaataaaaatttcaggccccagaatcatgctcacagattggaaaggttagatttttctgttgctttaatattatacaattgcaggaaatattataagcttcatttgtccaacagcatcatgagaacaggtaatgaatacaatatttcaggttcagctcacagaactaattttcataaattcttatataagtgaaaaacctcttatcctattgcaatgttctcaatctcattgccattaagactcttcacacaataaccactcagttaagagaatgacagagggattttttttcatgtgttttttggctgcataaatgtcttcttttgagaagtgtctgttcatatccttcgcccacttgttgatggggtggtttgttttgttcttgtaaatttgtttgagttcattgtagattctggatattagccctttgtcagatgagtaggttgcaaaaattttctcccattctgtaggttgcctgttcactctgatggtagtttcttttgctgtgcagaagctttttagtttaattaggtcccatttgtcaattttggcttttgttgccattgcttttggtgttttagacatgaagtccttgcccatgcctatgttctgaatggtattgcctaggttttcttctagggtttttatggttttaggtctaacatttaagtctttaatccatcttgaattaatttttgtataaggtgtaaggaagggatccagtttcagccttctacatgtggctagccagttttcccaacaccatttattaaaaagggaatcctttccccattgcttgtttttctcaggtttgtcaaagatcagatagttgcagatatgcggcattatttctgagggctctgttctgttccattggtctatatctctgttttggtaccagtaccatgctgttttggttactgtagccttgtagtatagtttgaagtcaggtagcatgatgcctccagctttgttcttttggcttaggattgacttggcaatgcaggctcttttttggttccacatgaactttaaagtagttttttccaattctgtgaagaaagtcattggtagcttgatggggatggcattgaatctataaattacctggggccgtatggccattttcacaatattgattcttcctacccatgagcatggaatgttcttccatttgtttgtatcctcttttatttcgttgagcagtggtttgtagttctccttgaagaagtccttcacatcccttgtaagttggattcctaggtattttattctctttgaagcaattgtgaatgggagttcactcatgatttggctctctgtttgtctgttattggtgtataagaatgcttgtgatttttgtacattgattttgtatactgagactttgctgaagttgcttatcagcttgaggagattttgggctgagacaatggggttttctagatatacaatcatgtcatctgcaaacagggacaatttgacttcttcttttcctaatcgaatatcctctatttccttctcctgcctgattgccctggccagaacttccaacactatgttgaacaggagtggtgagagagggcatccctgtcttgtgcccgttttcaaagggaatgcttcatcatcactggccatcagagaaatgcaaatcaaaaccacaatgagataccatctcacaccagttagaatggcgatcattaaaaagtcaggaaacaacaggtgccggaaaggatgtggagaaataggaatacttttacactgttggtgggactgtaaactagttcaaccattgtggaagtcagtgtggtgattcctcagggatctagaactagaagtaccatttgacccagccatcccattactgggtatatacccaaaggattacaaatcatgctgctataaagacacatgcgaaggtatgtttatagcggcactattcacaatagcaaagacttggaaccaacccaaatgtccaacaatgatagactggattaagaaaatgtggcacacatacaccatggaatactatgcagccataaaaatgatgagttcatgtcctttgtagggacatggatgaaactggaaaccatcattctcagcaaactatcacaaggacaaaaaaccgaacactgcatgttctcactcataggtggaattgaacaatgagaacacacggacacaggaaggggaacatcacacaccagggactgttgtggggtcgggggagaggggagggatagcattaggagatatacctaatgctaaatgatgagttaatggttgcagcacaccaacgtggcacatgtatacatatgtaacaaacctgcacgttgtgcacatgtaccctaaaacttaaagtataataataataaaatttaaaaaaaaagagaatgacagagggattaccaaaacagaaagggtacacatgctgatagtaatatccaattcacaaatattcctctacgcagttctaacccaggaaatatgtcttgtaattatgaaactttgatattttctgctatatagaagcattcattctaaacagtgaaatattctaaaaagttttgagtctatattaaggagaacattttaattaatgtgtctatcaaaataaaattagagttaatataagcaacatcaatgaaaggtttgtggaaaagaatgttttatttttatgggtacatagtgtatgtatttatggggtacatgagaaattttgatacagaaatacagtgtgtaataatcacatcagggtaaacagggtatccatcacctcaagcatttatttctttgtgttacaaacattccaattatactctagttattttaaaatatataataaattaatgttgactgtagtcaccctgttgtgctatcaaatgctaggtcttattcattccctctaattatatttttgtacccattaaccatccccactgccctactccccttcccagcctctggtaaccatcatcctactctcttatattcatgagttcaattgttttcatttttagcttcagcaaatgagtgagaacatgcaaagtttctctttctgtgcctggcttatttcacttgacataacgtcttccaattccatccatgttgttgcaaattacaggatctcattatttacaattgaataatactacattgtgtatacgtgacacattttcttcatctatttgtctgttgatggacacttaggttgattccaaattttggctattgggaatagtgctgcaataaacatgggggtgtaaatatgtctttgatatattgatttcttttcttttgggcatatacttagcaatgggattgctggatcatatggtatttctctatatttctagttgtttgaggaacctccatactgttctccatagtggctctactaatttacattcccaccaacagcatacaaatgttcccttttctccacatcttctacagcattcattattgcctgtcttttggaggtaagccattgtaactggggtgaaatgatatctccttgtagttttgatttgcatttctctgatgatcagtgatgttgaacatcttttcatatgcctgtctgccatttgtatgtcttcttttgataaatgtcttttcaaatattttgccaatattttaattgaattactagatttttttcccatagagttgtttgagctccttatatattctggttattaatcccttgtcagatggatagtttgcaaatattttctctcattctgtggattgtctcttcattgtttcctttactgtgcagaagctttttaacttgatgtgatcccatttgtccatgtttgctttggttgcctgtgcttgtgaggtattactcaagaaatctttgcccagtccaatgtcctgaagagtttctacaaaattttcttgtaccaatttcatagtctggggtcttaaagtctttaatccattctgatttgatttttttagatggcaagagataggggtccagtttcattcttgtgcatatggatatcaagttttcccagcaccatttactgaagagactgtctttttccccaatgtacgttctggcacctttgtcaaaaatgagttcactgtaggtgtgtggatttgtttctgggttctctattctgttccattggtctgtgtctgtttttatgccagtactgtgctgtgttggtcactatagctctgtagtataatttgaattcagataatgtgattcctccggttttgttcattttgcttgggatggctttgtctattttgggtcctttgtggttccatataaattttaggattattttttatgtttctgtgaagaatatcactggtattttgatagggattacattgaatctgtagactgctttgggtagtatggacattttgacaatagtgattcttccaatccatgaacatgaaatatttttccatttttccatgtcctcttcaatttcttgcatcagtgttgtatagttttcactgtagaaatctttcacatctttggttaagtttattcctgggtatttttttatgagattactttcttgatttctttttaagactgttcaccctggcatatagaacactactgattttttatgttggttttgtattctgcaactttactgaatgtgtttatcagttctaatagttttttggtgggggcttcaggtttttctaaatataagactatatcatctgcaaacaaggataatttgacttcttcctttccattttggatgctctttctttctttctcttgtctgattgcttagctgggacttgcagtaccatgttgaataacagtagtgaaaggaagcatctttgtcttgttctagattttatgggaaaggttttccatttttccccattcagtaagatactagctgtgggtctgttgtatattgcttttactgtgttcaagtatgttccttctattccaagtgttttgagggttttatcatgaagggatgttgaattttatcaaatgttttttcagtatcaaatgaaatgatcatatagtttttctcagtatctaatgaaatgatcatatagtttttgtccttcattctgttgatatgatgtatcacagtgattgatctgtgcatgttgaaccatccttacctccctgggataaatcccacttggtcatgataaatgatctttttgatgtgttgttagatttggcttgctagtgttttgttgaggatttctgcatcaatgttcatcagtaatactggcctgtagttttctttttttgatgtatctttgtctggttttggtatcaaggtaatactgaccttgcagaatgaacctggaaggagaaactacttccatttttcagaatagtttgagtagagctggtattaatttttctttaaatgtttggtaaaatttagcagtgaagtcattggatcctcggcttctctttgctgggagactttttattacagctcagtcttgtcagttgttattggtctgttcaagttttggatttcttcatggttaaatcttggtagggtatgtgattaggaatttatccatttcttctaactattccaatttttttggtatatagctgctcacactagtctctaatgatcttttgaatttctgcagtatacatcataatgtctgttttttcatctctgattttactggatcttctctttttcttagtctggctaaaggtttcccaattttgtttatctttcgaaaaccaacttggtgaaaaagattaaattcagtaggtcttaaatactttggtactttaggagattaatacaaaaaagaaaaaaagacatggattcttcaaacatctcacaatgaagagaggataaacacattaattttgtatataaaggagggaggagatatgtacataaatgcttgtctaagtatagaatctctacagaaggatatgtgaaaaccaaaaagaatgattgcctttgggtcagaggactgggggactggtgatctgggataagagcacttaattttcattatatactatttcccactgttggaatatttgaatgtatatacagtcctttctattccgataaataaattaaaaagcataaaccatatataaaataacttttacaaaacaaagttaaacgtaagagatataaattacacttgatattcaaaggatagaaagatcctattcacctacagaagcagagtaagtaccaataagggggtggtccatgagatggatgggtagaatagatatataacaaaaatcattccagggaagagaacacctgactatagccacaaagttgggaagggatggggcgtgtttagaaaagtgatagtttagaagcttaggctgcatataaggatgtgttctttttctgtagatgcctgacaaaaaaaaaaaaaaactatacagttagcatcttaaagaacgcacatttaccatctcacaggttttgtggtcaggagtctgaattagctaggtcctctacacagggtctcacaggctgaaatcaaaatgtccaccaagactatggtttcctcttaagcatagggccctcttttaacatcactggttgctgacataattcatttccctgcagttttaagacagacactcacccattttcttgctgtcagtcaggagccactctcaacttctagatgccaccagcgattccctgcctagtagtccctcaataagccctctaatgctcccaagatttgaatctttctaacttcagagaaaacccaatcccttttaaaggctcacttgattagatcaggcccacccagataatggccctcttaactgacttaaagtcaactgattagtgacctcatcacaagtgactctacaggatgtgtaccctataggatgacgtattagtccattctcacattgctataaggaaatacctgacactggataatttataaagaaaagaagtttaattgactcacagttccgcatggctgaggcctcaggaaacttacaatcatggcagaaggcacctcctcacagggcagcaggagaaagaatgagtgcaagcaggggaaatgccagatgtttataaaatgatcagattttgcgagactcactatcacaagaacagcatgggggaaaccaaccccatgatctgattacctccacctggtcctgccctggatgtatggggattatgaggattacaatccaaggtgagatttgggtggggacatggagccaaaccatatcaggtgagaatcttgggagccatcctagaattctgccaagcatagctggtaacagaagatgagaacaaaaattctcaaaagctaagccaaaattaaatagttttccatcctatatttctgtctccaaacgttatgctacttgtaaaatacacagggataattaggccaggcacagtggctcacacctgtaatcccagcactttgggaggtcaagatgggaggatcacttgaggccaggagttcaggaccagcctggccaatatggcaagaccccatctcttaaaaaaatggataattacagttgcaactgagaaacctcccatatttggtaactgtctactctttggctatttgtggtactcatttattataaggcctatgttactgactgggaatatctacttctcccttcgcagtcttttattcaatataaaccattcctacctctgtttgctgtactcttggctgccttgtctgttactgttagattaatatttaacttactaaggtcctcctcactccacaaagacctagcctctttattacttttttcccgctattttcagccattacttttgtgaccttgcataaattcacactagaaaagtgtaagtattcaatggttatatagcttccaactttgtttttgcagttttataaccttatttgatgtattcaatgatcagtagtttgttctcatctacactgaatgactatagattttttaaagtggaaacaggtacataggtaaccaaagtatacagcttgcttgggaaccttcatcctcattatgtttctggacaaccacatatggatacagtatgggacatcccttaaccttaggcctagtcagctttgttgaacctgttatcaatacgcacatctggagttcccatctccttcatgatggcaaatttctggatctctctgagtgccccaggggcatgcttcttgaagcccactcatggatgtgcttctgagtgttgatggtgtattcttgtgtcaccacctcattgacagcaggagagcccttcttcttcccacccttctctgcaggggccattctgccaggccaaagttggaaagtaacctccatcttaactacccaagaaagaagaaaaacaaacagcatagctttggtgtaagcaaaatgtcaattctacagctacatggtcaataagtatacacataattaatatttctacaatgttgaatatgattatttaggaaaacaagtctcagagttagaaatacccacttctcctttgatctggcagcttatattcttctcacagacaaaaatcaaaagcccttgataattttgcctgctgattgggaggcaatgctgatagacaaagaagtagaacactatgaaaagaaggcctcctgatacagttgctagtctttcctgacaacgtggcatatggttccaaatcttcaaacagctatcatattgctacactgatttaacaaggtgatctgtattctcccaaattaaatacatgtagagcactaggataccttcttctgagaaaaggggtatttattttctttctttgatactagatttatagcataacagttaagcctgcaagtaccaactgagtttctactaagtgtaacacattgtctagtaggtgggtgatggtagcaaagagaagatacatgataaatcagtcatgaatcctgccctcaagttatatataataagtgaaaagaaaatcctgggagcagaatcgacccaattttcctttctcttctgatgtcaggtgggctctgaacacaatcctcataatccccatttcctagtttccatgcaccattgtgatccctccccttgagtatgggcaggacctgtggcttgtttctagtcaaaagaataagcaaaggtgacacgacagatgggatacatgtacatgactatgtgattatgttacacaaacttgtcatacccattttgttggagtctctgtcttttaccggctttaaggaagcaagtggccatatggccaggaactgcaggacgattctagttgctgaagctggctctggactgatagccagcaagaaattgaaaccctcagtcctacaaccacaggaattaaattctgccaacagctgaaatgagcttgaaaacatctccttccctaattgagccccagttgagaactaagtactggcaaatatgttgattgaagctttgtgagaccttgagcagaggattcaagtcagctgtgccctgactcctggccccaaaaactatgagacaacaagtacacattgctttaagccactaagtttatgataatattgttatacaacaatagatgactaacacatctttcttcttatattattcaagttgctaacatatcataagaggtaaactcaagtattctgaacatccagtcaccactggtgacatgaaatccccagcccacatgctagagaaaaccagagttggtcacacagccagacccttttgtaagattcaagcggcaatttgccaccaatattgccaaaatagccagtatggctgcccaattaacagatcaaaaactaaagatcagctgctaattcctgccttgtacattctcagagagtaaggaccttccatttcccgactaaatgctcagaatgagccatcaggcctgttaggtaaaaatgagaaatttgaaggatcaagcggccccgcagacgctggtagagagggcaagcttaaggtgtagaagaaaactgtcattcccacttaatccaaaaaagtaaaaatatatgcctcctattttctttcagatataataaccaccttttcttaaacaatagcttatttgggggcctgcattcattacaaacaaaccagagtaggcttatatatcatctgaaggttcttttttaaaaaatttcttttgagacagggtcttgctctgtcacctagactggagtgcagtggcacaatcataactcactgcagcctcgacctactgggctcaaggaattcttctgcctcagcccctgagtatctaggactacaggtgactgtgaccacagccaggtacttttctattttttgtagagatgggatctcactgtgtttcccaggctggtctcaaactcctgggctcaagcaatcctcccacctcagcctcccaaagtgctgggattacaggtgtgagccaccatgcccagctaatttttattttttcttttttgtagagacaggggtctcactatgttgaccagaatagtcttgaactcctggaggatagtaatcctcctgccccagccttcgaaagtgctgggattacaagtgtgagccactgtgcccggccacatgaaggttctttccattgttcttccagaagtctcatcatcacaggctcattgtagtataaatattttcacataaggaatgaaagtgatgtgttagcatgatcttatcaggatcaaggtaactaaaaacaaatgacaaggtttctctttttattattcaacattgagaagcagaaaagtgttcaactgttactgtatttatttaatgctcaccttttaaagagtaaattcagttagttacgtgttataaaatgtgagataagacataatcctagagtaatgaaattttctcctttgtaaaaggagattcactataatttttcatgtaaagggaacatgaaaccaataacctagttccaaatggacagctaataaaattaagtttgcacatttaagagaaagttattttaatttcctttaattgtatacaatgttaaaaaggctttttgcaaatcattaacagttaagacgtactttcattgacaatttaggtagacaaaatattcaatgttgtgtgacaaaatcattcttataacattagtaaatgcataagcacatttccaaaaattgcaagaaataaaagccaaataattggaaagaatacacatttactctaagtaaagcttgattatacgcccagagatgagcatgcaaagtatagcctaatctatactcccacaatgcctcaaggtatctctgagtgccctgtttgtgaacatctgggtcagttctatggctgacaccacaatgtcctaaatagggcatgacaataaatgaaatgtacaataatgtaaagcagtataacctctagatacaataaggcactaaatgtaacaacgttaaaaatcagcaatatagaagctaataataaaacaaaacaaaaacatttatgggggtttcagggggaaaaaaactaggcagagtaaatgaaagataatctgtaggttacctctattcgctcctatcaggggcaagattcacatcctggtctctcccctgctaatacctgatgaatcaaactgatgaacatacagccaatcaacgaagccaaaaaaaatgatacttaaaataaatacctgaaaagatggatcccacattacatcttacttaacgcttccaacttgctatgagaaagatactaagatacgcaaagttgaaagtgattcaaattccacactaacaatttaaatgccttgtaagagaaagaatattcacacataataatacaaagcaaagcatgagatgagtcatgagaagatacaagtaaagtgggaccagagcttagagggtgaaagacgacttctagctaagataaggaagggcatcacagaggaaggggcatttaagttagattttaaaagatagaatttgaaaatacagactatagtagccttcatttcaatcaaaagcagcagcatatgccttcataactgcaatgaaatattatgtacgtaattattgaatgtctctcttcctcaatagatgtcaagttctgagagggctgagactatactttttcaatggtctccttagtacctagcagaatatctggtatgtcacagatgttcaacaaatatttattaaaggaataaataaacagaggcaggaatatagaggacaaatcgctcaatttgcctagtaaatatagaagacagggacatgaagaacaaaagatcacttaaggtgaaatgacagaagaccttgaaaagtcaaactgaagaatgtttatttggttggaaataaggagtcactgaagatctttatggaatgtagtgacataactagatctgtgctttcaaaagtatatctaaaagtaatgtacatggcagactacaaaaaagataaaatgaagaagtcaagagatcattataggagtctagatcaaagataacaaggacctgaagtagaataaaggcagtgggaatagaaagttaaaaaaaaaaataacgacagggatattaaacagataaaatcaatagaacaatcagttagttatccattccacaaacatcttttgagcaactactacatatctaccagacactgccaggagctggagacaggaaaaataaaataagctgtagtccttcacctcagagttgagagtcaatctgtcatctcaataagaaaaactgattgaaaactgatctcctagctaagataaggaaaggcatcatagaggaaggagcatttaagttgaattttaaaagacagtttgaaaatgtagaatatggtagactttatttcagccctttcagaataacacaataaatgaagaaagggagaagtcaatgcctctcttaaattttgagaacagaaactaagaggatggcatcaccatgcagagaatggaagaacaaaacagaagaaggtggacagggaggacggtatggacagattctgacacactgtctttgtgtggaatacgcaagtgaaaatgttcctgaattagttgcaaattcagaactggaggacagagcacagattagggcttatgatttgaaaggcatctagcataaatatgagagctgaaattgagagcagacaaggtaagaaagggtgaaacatgtagaaccttggagatgatccatatttaacgagatgagagaaggcaaagggaagaattaagagaaaattatcagaaaatcaaaccaagccaaaccaggaaagaggagagcaatcagaggcaaaaggatcatcaggacaacaataagtgtttccagaagcatggaccatcaacagcattatttgcaacagagaaatcacggaaaattaggactgacaaaaaggccactggatttgggaataaaagaaatgtattagtgatatttgagagagcagcagagtgataagggaaaactcagtttgcaaggagttaaggtatcagtgaatggtgaggcagtggagatagctggaacaaactgctctcttgaagtctgaaaatgaaggaaaagaaaatgatggaacaatagcttgagggacaacagaaggaagaaaaaaatttaggctaaggaaagattatatgagtatgtcttttgttggagaaaaagtggacaaaaaaagcaacattttttttagaacaggaaagagcagagatagaagatccagtaaaggcataaatcaaagatgcataaaatacttgatgtattcattcaataagtatttattgaatgcccaccataaactcaaaactggagaatatacaccggagaacaagctaggtaggatcccaagctcatggagcttgtatgtctaagcttccagaggaaaaggaagaatacagtggacagggtagaatgcctttattctaccctgttgttgcagaacagccacagagtttggatggaattaattccactgctaccaatggtctcagaaatcagcatcatcttatctgtgttatcagggtatttgattcacgaatgaccacacaacctaagttggtcctatcagaatgaaacctgggactttgattaaatggaaaagaggacaatcctgatcgacaaaatgtgctgaggtgaggtcgggaactgttgcatacattttgctacctgaaagaagcccacttgtgctgaaggcaacatagaggaggattgagctgagagaattatggctgtaaaaaatgaaactctgatcaaaccacatctgaaacccatcctttctttggacttttcagttacatgatccaaaacatctctttctttgtttaaggccatttaagccgagctttttgataatttcaagtaaaaccatcctaattacaaattagatgtcactgtaggcacaagtaaaacggttataaaactgcagcacaaaataagacctgcccagtgcagataccagagactgtgccctttctccactcttctggctttagctgtctgtattagtcagttctcacgctgctaataaagatatacacaacactgggtaatttataaaggaaagaggtttaactgactctcagttccacatggctggggaggactcacaatcatggcagaaggcaaaggaggagcaaagtcatgtcctgcatggcagcaggcaagagaaaacttgtgtaagagaactcccctttataaaaccagatctcgtgagacttactcactatcatgagaacagtatgggaaagacccacccccatgattcaattaccccccaccaggtccctgccacaacatgcggggattatggaagctacagttcaagatttgggtggggacacagctgaaacatatcactgttcatggttctaagctttgaaactacaactcattctcttttttttaaattatactttaagttctgggatacatgtgcagaacatgcaggttacataggtatacatatgccatggtggtttgctgcacccatcaacccatcatctacattaggtatttctcctaatgctatccctcccctagcccccaccccgcgacaggccccagtgtgtgatgttcccctccctgtgcccatatgttctcattgttcaactcctgctccttctcctataaatcctttccccactcctccacccaaggttattttctcttcatcagcccctaaacttcaagagatcttagcagcctgggagcataagggcactcttcctctcagcagcatccaaatttaccccatcttcatgctccagaattaagtgagaggggcctatgacttgagcaacagtcaccaataagggaattcttgggcctaggcccagcgaatatcctttctgcaagtttgcccctgtggctgtatcaaccctgagtttccatcttttcgtatcaatctggctgacttctcttcctttgaaactagactcacagtgcatctcctcctggaaggcctccttcccagtggcccttggccgtcagatgctgctcctcagggttcccatgaaaatcaatactcacctcctcctagccacacagacatggaaggacagagctagatacaatgtgatgttgttcttactgggacaaggattacactttattttatttgtgtataacctacatgtgtgggggaaatgaatgtcacttgtaatgtggaggaatgggtgctggactcgcaggcaaaacacaagacttccaggcatgaggggatttcttacaagttgcaggacctctccaagattcttaatctataaggactttatcactgggttgttgtgagattaagaagcatactgaatctgaaaagtattgtagtcctttgagaatgatacctagaaatatttttgttggatattatgaatgttcagaggaggcaagagatgccttcttgctagggattgctagggaaaaactggagacatagataagtgaaaaactcaagaagaagctggcctttaagctgactttggagaatgtgtaagatttagacatgctgaaatggggatggggagaggtagccaggtgaaggaagccaaaagctgagaagccagcatcaacttagcagctaattttactaagcaaatatgtgccaaccactcttctaagtgccagggttacaacagtgaaaaattcagaggaggcccctaccctaagagggtttacattccagttgggaaagacagacaataaacaaagacaaagatatgaaatgatttctgttagaggtaagtgatgtgaaggtgatgtgctatggggactggaggggaaacattccaggtaaggtagtaaaggccattctgaggtgatgacatttaacctgggaagaaagtgataaaatagagtggagctgaggaagaatatgccaaaggaaataccaggtgcaaaggccctgaagtaggaacaagcttggcgtgtttgtaaaaccagaaaaaaaaaaaaaaagccaatgtggctacagcaaagtggacaaaaacaaaagtagtatgagattaaggctgaggttatatctaagtaacagcacggtgtcagtttagattgaagtttgtagtagtagatgatccttgaaaacaaatttgggctagaattagaaaatctcagacaccaaattaaggtggatatatttcattcttcaaaagcaattgtctcacaatataatgagccaggtctgcgaggcaagtcctcagggatgcccacagatatttctcataaattaggtgactcttgtggaggtcatgggcacttaatccagaacaccaaggcagcaaggcaaagcagctgcgagactgttggtgacgtggaacacagactgagcagaaagttctctagctcaatttcccctgttgcaggaagaaatgaagcccagagaagaaaacaggcctgggaggagagagagtagacatcataactgatgttcaccaatacgtggttctcctctagttctgcccaaacaagaatgataatgtgtcactttgggaccaaagcatttaattgctggtgtttggctccccgaacctgccatggcaatcacttgttaccatggaggtgttatagacaggtacagtgtagaatgcagagccaatatctggagggaggctgccatggagaatcccccagatccactctggtggtgttaactcactgagaaattggaggttgtttgttatggaaggataacctaacctgtaatgattaatacaggatatagacagagtttttaaaaagaccagaaagagtagacattcttgctctgagtggggaaaggaggaggagagaatatgagatactactcaatgtctctgacagcatgcattttttgccccaattctccattcttggctagatcagtgacctttatcagatatgtaagccttgcacaaaataccatagactgggtggattattaaacagaaatttattttctcacatttctggaggctgcaaatctgagatcagggtgccagcatggtagagttctggtgtgcagatggccaccttctcgctgtgtcctcacatgacaaagagagaaagagagcaagctctctggtgtctcttcctataaaagctctaagcccatcatgagggccctaccctcatgacctcatctaaacctaattatatctcaaaggccccatccccaaataccatcacattgggggtcagggcttcaatatatgaaattttgggcaatggatatgattccatctatatctgagtgttttctcccactctttggtttacactttggccatgtgatttgcttggctaacagaatgagctggaattgacagtatatgccagttccaaagccaagccttaaagagcccttacatgttaacagtttcccccttgcacctctgctatgggcatgagaagaacatggcatggctagaccattccacaaaggaggacagaaatacatggagtactaccaccactgcaaacacatattgcaacaatctgcaacatgcagaaccacgacccaccaagcctgcagcataaatgacaaatgattatgtttttaagacagcaagtttgtggtggtttgttaggaagcactactggggcagtaggtaattgatctatataatgactacaggaaaatggccaaggaggacctgtggctctttaggaagagtcttatgctaacaaagctgcctaggaaaattaagttgtactgctccaaagactcttctcttcaaatcctgttttcttatttaccttttccagttccctgaaataggtcctaaattcaactctgatactggtcagcaaggtttgtgaagaagacaaaagcactggggagggggatacagaatcataaagtaatacaaaaaaaaaaaaaacagaaaagaaaatttcaggggagaaaaatcaagtgcaatacaaaacaccaaaggaaatgagatctgaggtctctaagtttactaagaaggctagtcatcatgaagccatttttggacaccagggagacagaggcatgggagttcaggaaaaaacaagtggcaagaaaattgagacagtgagtttaaatcattgagtttagaaacgtaacaatgaaaagaataaaaaatagagcaacaactagtggagcaggaaatagaattcatttcctaatacagaagacctatatatataggtttctatatcagtgctatatcagtgctatatcagttttctgttgccacaaaacaaattattacaaacttattatctcacggttttgtaggtcagaagtctgagtgagcttagctggggtctctgcttcaagtctcacaaagccagcatcaaggtgtcaaccaaactgggctcttatctggaagttctagagaataagacctccgggcatattcaggtggttggcagaattcagttccacacagcaaataggactgaagtccccatttccttgctggctattggctggaggttgctcacaactcctagatgctgttctctggccctgcatgtgctcatctccatcttcaaagtcagcaatggtgcactggacctttatcatattttgaatgtccctgacttcttcttctaatagcagctagaaacaaatctgttcaaaggcccatgtgactgtattagacccagataacctccctaccttaaggtcaactgattaggaacctcaattatatctcaaaaccccttgtgctgtgtaacctaacataattatggaagtaacagccatcatatttacagtcctagaaattatggcagaaatcttagagggccatcttaggattctgcctaccacatgtacacatttaaagttgaaaaagatccaaaagcgaaaagaccttgaagaagattttaaatagaaccttgtattacacaaattacctataaataggaaggaaagaaatcaaggaaaaagtatgccatcctggccatagcaaaaaaaaagaaggatgccttttattggagatttgaagaaagaattaaaaaaaaaaagaaaaaaaaaggcagaggcaaaagacaccttttatgccaactatttactttgccaaaattagtatcattttaatttagatacaaagaaacatattctaggctctttgaaaaagttcctccagatggttacatctccctggagtgacagcacctagcgtagccttgcacatattgggaattcaattaaacactgctgaccatctgattgagaattcagaggctggagtagctgactcaatataaacatatggcttagttcccatcaaaggaaaaatcaagtcactctattctcctccccaacatcgcacctcctttgcaatgtaggagaaaacagatatgaactaataaaaatagacgatgtaacagagattaggaaacaggcaaactggagaatacaaaatttctctaattttaccataaaatcagaatgcttcagctaaggatcagcactgtaaatatgtcattcttaattcaattgcattcaatcagatcaatactttccgatcatggcttcaggatatttaagatggggaagacacaatctgagcccagctgctaagtgttgggggataggagaagcacacaaatgactatactgtgaggttgagctatattaattgtggaaagccaaatgaagataagaaaacaaattaaaccacttttaaccctcttaagagccatatgaaatatttatacatgagaaaaagcctcaggcagatcaaaaatatttttcaagatcatataccaagtatattgtagggtacagattcaaattcaagactgactccaaactcagtctctcccaaagaagaggcaaatcacctctggttggctagttggatgggagtttggaggctggtggagagaaaccaggaacagtttcttagggaagcagttatttcaggtaaaacttggaaagatatacacagttttgaaaagctgagatggcaaagaaggagaacatttccaggaggaacagcaaaaagcacagaagcaagaaatcaggatcaacatttggagaatggtgagtagatcaagtagcacaaactctttacaaataaagatagattggatgcacattctggaagtcaaatattggggttaataagttactgtaatagttcagggaagagcctaaactagaatctcagacatgaaaaaggagaaaaggagaagaggggactaatgtgaggagtcagatggaagattactctcttatgtttacattacagtcaacaacaacaacaaaaaagacagccaagtccaaaaactaagcttggattcaaaagaaaaaagtcatccctctgccaccctcttttgccctctagtctagaggttagtaaactatggcccacagggcaaattcaacccaccatctgtctctgtaaataaaattctactggaacacagccgtgtccactcatttacggattgttaatggctgctttcaccctataatagcaaagactatgtggtccacaagacctaaaatatttactttctagtgctttacagaaaaaaaaaaattgtcaacgcttgctctagttccatactccacaagccactcttatttgtttgtttgtttgtttgtgacagggtctcactctgtaacccagactggagtgcagtagcacgatcacagctcactgcaggctaaagcaattctctcacctcagcctcccaaatagctgggattacaggtgcacgccatcatgctcagttaatttttttttttttttttttttttttttagcagagacgagctctgtctgtgttgcccaggcttgtctcaaactcctgggctcaaacaatcacctgcctaggcctcccaaagtgctgagattacaggcgtaagccacttcacctggcctgttccaattcttttagtagcttgttctcatctaaatattaagcttatttggatatttcctgactgataaattatcaagactatcatttgaattcctattatagtaactgagactttggcttgcttgcaccatcagccttccccgcatcctccccactctccttccccaccacacatactttcctttccccgtatgaatatatatttatattcgtagtgtttgcaacattattgtgactacataaatattcttcattactgagccagataatgtaatgtaattatgtttatgtttccatgcttataaaaatgttattttctgaagttaatagttatcatttgtttcatttgcttagtttttcatttacctatcactattttttctgagtccaacacatttgttctgttcatttttttccaaacattcaaacacaccaaatacttcatttttatttgttcccctcaaaaccaccccccccaataaccctccatcctttttctctaatctgagtggttgctctcaaggcctagtgaacagttgcttttctggaacttctctctgccctgccatattgagtctgttctcctgaatcctatgtctttctctttattgattttctcccttgttttatggaagctcatcctccagaagctttctatgaaatcacacataagatataaattgtttaatccttccaggacttagaatttcttcattctgtcctcatatctaattgatactttcagccggatagagaaatctaaactgaaaaggatttccccctcagaattttgaaagcattgcaccactgtcctctaccagccagtgttgccataagagtttgatgccattctgatttccatccatctctatgtgacttgtgttaatgctttgtttcattttatactcccttcacaaagcttttaggaccttattttaatctatgatgttcttacatttcagaatgacatggctggtattcttttctcatttattgtgctagatacttgggcagccttttcagtctagagacttacatccaccggtactaggaaattttcttgtaatatttctttgatagcttccttcctttttcttgtcctctatttgtatcaggcaacctgtagctataataaggcttcataataaaccatcctaaaactcagagacataaaacaatagccattcataattgttctagaatctaccagtcagtcaggcagttctgctgatcttggttggatttggctagggagttctttttggtgttgactagacctcacacaggtatctggggtaggctggctgttagctgaatttaaatggtatttggagctagtgcagtggctcatacctataatctcagcactctgggaggctgaagcaggcagatcacctgaagccaggagctcgagatcagccttggcaacatagcaagaccttgcctctaccgaaaaaaaaaaaaaaattaaaattagccaggcacaatggcccatgcctgtagtcccaactataactcaggaggctgagccggaagatcacttgagcccagcagttggaggttacagtaagctgtgatcctgccactgcactctagccaaggagacagcgagactctttaattaattaatggtattaggtaggacagggacctgtttcatgagtctcatccacaagcatgttttcatgataatcacagaggtttcagacattgtatacacgtatcaaaatatcacactttagccaataatggatgcactttaaaaaaagaagaaaaaagtatcacccataaatatgtacaattatatgtcagttaaaataacagtagaagaaaaaatgtgctttttaagcctctgttgtgtcaagttttctataacaaaattgatcaaattgggtcacataaccaagtccagagtcagtatggagggcacctgcaaaaggcttggatacatgaattcatgcatggaacccctattggtcagatcttggaaatgctgaattgatcctctaattttcttttctttcctatgttccatctcttaggtttattttttttctttgttgctgctgctgttgttgatgatccactttctatgagatttcttcaatgttatcctgaaacttctaaaattttttatgttagttcataataaattttaaatttccaaactactttcttgttatctaattttacctgtttcatagcatccgttcttgttttaaaagtacaatatcttctcttattactctaatgaaattagtaagagtttttggaagtattcttcttgaattgcctctgcttccctcagcaggtgaagggaagtttcacccaacttcccacagcagagaaaggtatctgggtgatctaaaggctcttgtactttcaaccaagatccatgttctgctctgtgttttactcccagtttttgtggtgccgggagtttccaaatgtgagtctctaaagggtttgcatctcatcaatgtcttttctatagggacttcagaaaattaaaggtaactctctgcaggtagcattcttcctttatttttcatcttccaaaattttgttaagatctctcttctgctatcccaatttctttatccttataagttaataccttttaaagtcttctactgccatttcagtgagatttgaggaaggaaagaagaggagtttacatggtctatagacactctctccatttgcttttggacacagtgaattccaagtaacaccacaataataaagcagatatccaatgattgaaaacacaggtgaagctcaagataaaggtcagaattagagatgtaaattggagaactgcttatacagaaatggtttctacaactatcaaaggaaataaacaaaatataaaataaagacaaaatatccaatgatacaatatttagaaatgcctaagctaggaaaaagaaactatcaaagagctcaaagaaggaggaatgataaaaatagaagagtaagtgggttagtactaagtcacaaaggtcaagggagaaaaaggtttcaagagaaaaaaagacaatcaatgatatcaaatgctgctgagaaacacaggaagatgaggatgttgaggacataccatttggtgattaggaagatgatggtgaagtttaagagagttgtttcaatagcatatgagtacaaaagataaagaagtagatagtaaagtagataatgtattggtggttcttttttccccaataatctggtggccagtggaagacaaaaagcctgagataagtgagaggagaatttgaacatacatgaaagttaagaaaagtttttgtgtttttttggtttgttgtttaaggaaaaaaaaaaaaccttagcaagagtacaaaaggaaagatttgaggaaagaatgtaaatgcaaagatgaggaaaatcaaaggataataaaggactggaggagaaaggtaggatatgcactcatgagcacacatgcagaggttcatcttagaaaaggggaaggcattcttactgcaaggcagatatgcagggaaagagaaagaataaaagcagaggtagagagagacaccagaaaaaattctgaaaacctcatgcccaaatgtcctcaagctcagttaaataagaaaccaagttatctgctgagagcaagaatgaaatttatagagagtgaaaaaggtttggaacagctggtctggtaaatgtaatagggggtttgtgggggaggcggtatttattaatttacttaagaaatagcggcagcaagaaaagtctagataaagctattctaagttctgggagactctaaacaaaatatggatttagaaacagcaaaatttctgtttttcacaatagtagctataataatgagagatgctcagtgggtatgaggtaggtaatgtcaagtgatcagaataaaatatccaaaaattaacaaaacctgaatttttcaaaaggacttccttttgtattttactttttaagaagaaataagaaaaagaaaactaataaatcttcaatccagttctttcaacatttattccttgctaatttctgactaataaaagcgttaattccaggctaattaagccttcttaactgaccttcaaagttctcctcaactatgcctaactatatcaactccaatctcctttgtccaaacactactcctccactacaatctaaaatagttgcatttccatgcatagtagttcacatttgcaaatacaaaggctgctgaatcttagaatttatttatctctaccaatgaccaattgttcacaattaggttacttttggtcctgattccttttggaatttatatggaaagatgtaacatttacggagccattcattatcactgttgccttcaccctttccttagctaacagcagccacttgattcatttacctctaaagcattggttctcaaccagaagcaattttgcctcccagagaacacttagcaatgtctagagatgatttttggcatccagtgtgtacaggccagggatgctgcaatcctacaatgcaaaggaaaaccccaccccgtccccaacaaaaaaaaattatctggtccaaatgtcaatagtaccaaggttgggaaatcatgctcaaaagctacctcattcatattctaagacctataaataggtcaacaacgaaataaaacctgcctttggctcaagctcattctctcctctgctcctgatctcctacattcccaggccctttgtctgccttgaccattgagactttgattgcctttttcccagcaaggctatgatatcctgattctcagatccttagctcccttgggccatctgacacctaagatgcagttgcccctgtgaagttccaaaactccccaggcttgtttctcactggggggtctttaatccttgttttctggacttgagtctttgcacggtctggcctctaacataacctgactaatcctaatcatctatttctccctacaccccagggtgacaatatggtttgacagtgcacatcagagcagcctttaaaaggccttctcgagaccatcctggctgacacggtgaaaccccgtctctactaaaaatacaaaaattagccgggcatggtggcgcgcgcctgtagtcccagctactcgggaggctgaggcaggagaatggcgtgaacccgggaggcggagcttgcagtgagtcgagatcgcgccactgcgctccagcctgggcgacagagcgaaactccgtctcaaaaaaaaaaaaaaaaaaaaaaaaaaaaaaaaaaaaggccttctcctgtctaactttggagtctcagcattccatctcttcttcctgcagtcacctaaggggctgttacctatctccagaacaacagtttacatgtgttaagacctcattatatggttgctggaggaaaacatgaaccaataacttgcaggcttgagttacaaagaacatacatttaaaccaactgaattctggatctaacagttctttcattcagttaccaaaatatttattgaagtacagtaccaggcatgtgggggtgggtggcttaaaaaaagtatccataaatagctcacagcttagtatataaaatcagatatgtaaataagtaatctgtaattagactaattacagtcagattattcctattttataatatctaaagaaaattgtaaaagaaataaaatccttcctcagaattgacagaactaatggtcttaaaataaaagtacatgggatgaggctgggtgccatggctcatgcctgtagtctcagcactttgggaggccgaggcaggcagatggattccctgaggtcaggagttcaagaccagtctggacaacatggtgaaacctgtctctactaaaaatacaaaaattggccaggtgtggtggtgggcgcctataatcctagatactcaggaggctaaggcaggagaattacttgaacctgtgaggcagaggttgcagtgagctgagatcatgccattgcactccagcctgagtgacagagggagactctgtctcaaaaaaaaaaaaaaaaagcgcatggataaataaatgagcaaatgaacaagcagatggataaatgagaaaccaaatatcaaacaagtaaattttttctgggggtcttaggcaaagtggtacatcatgtaaatgagagcctcattattctactacatctcctttcttttcatcttccttaaatgtcattctcactataaatgctaattggtttagcatatataacaaattaatctgggtgatagaataatgctacaacacaatccatgctgaaaaatctttgcttctcagttttgcagataatgaagcctctaaacagacatagcccaccagtatgtagacagaccaggactgatactaggccaaaagacaccatgtagcctctccagatgtttacagccagtgtgcatctgactggtcagtgcttgtgcctcatcagtggtaagttgttttaatgtcacccttgatcagtacattctctcaattttagagcagcaggcagggctcccaagaagagatttcataactatattatgttcattctccctttaaaagtataaaaattccaattaccaattgacatagcagaaagcatccacctggttagactgacttttcctctgcataataccttgttaatccatcataatgatttattcatattgctgctgcactgagatatcagatgctacaactacgattatcactgttcctcgtaaagtggagtcttacagagctggctttgaacccaagctctatcaggtactgtctacgtgatgttcaacctcttctaggctgaagtacgtgagactttaaccaaatgcaattgaggaaaataatatttaccttagaggtttgttgtgagcattgataaggagacgatatatctatacagactagaacataccaggtgcttaatgaatcctagcttctccttttagccaaatctgatacaaacatattgatcaagttctttcccttccttcctttcaccatgtgatgcctgctccccttcaccttccaccacaactttttcttttctctttgcttaattttctttaagtccctccaccttatcggcaatttactttttcatttatcaaaagttactaagagcacgagcttaccactgcctctcccaaaatatctcctacaaatctctggaatccatagtgaaaagtagaaactatgattccaaatttgcctttaccctaaacacattgttttgcctttgttttaaagtggcttttccctcctcatctctgataattttccagcattaagagcattggcttttgagtcaagcaatcttggattccaaatccaattctgttgcttatgtagtcgaattacttacctggttgacttattaaatttctgtggctctcactgtcccaaaaactagaacatgtatggcaatgggcacaatgcctagcacataataggtgctcaaatatatcatatttaattgttctcagcactggcattgctaaccaagactaccttctcagtcaacaattagtctcaaagatacaatccaaatcatgtcccattagcatgtgccctgttctgtatttattcactcaactaatcatctcctgaatgctgtatatgttctaggcataaaataaagacatttgtacagcactttcaaagataactaaaccaaagtttcagacttaaaggaactcattgtctagtgggaaggcaaacatgtaaacaaataattacacggcagtatactaagtgctaaaaatagatgcatgtacaaggtgccagggaagcaccatagagagagatcaggcaaagcttccttgaagagatgactatgccagagttgagtctgggaggatgagcagggattcactgagcacacaagggaaagacggacattctgggagagacaggggcaggcaacagtggaaagtccatgatgcctgctgaaaacaccaagtacaggaattgagtcgggttggagagtgctgctacaaagaactggtgaaaaaatggggcagttaggagggagccaaaccacaaaaggcctcaagtgatgtgccaaagagtatggactttattcattaagcaatggcaagccactgattttttttgtttttggggggttttttgagacagggtctcactttgtcacccaggctggagtgcagtggcacgatctcagctcactacagcctcaacctcctgggctcaagtgatcctcccacctcagccccccaagtagctgggactacgggcatgcaccaccatgcctagctaatttttttgtattgttagcagagacggggtttcgccatgttggccaggctggtctctaactcctgagctcaaacaatccacccacctcagcctcccaaagtgctaggattacagatgtaagccactgtgcccagcctctattgatatatttctaagtcaaagaataacatgtttataatggcagaggaggaatcaggttggaaggactgttattggaagtggtgatactgagtggacagaagtagtaaggaaaaacgtcaggcatggctctagagtttctagtttaaatgatgcaccatagttcctaacacaaatgatgcaagtaacagagcagaactctgggtacagataattaatgttttgcatttcatacctccattgaggaggagatgttcaataggacaccggggataacatgtctagcgtgcaggagagagaaatgaattacagatacaggtttcgggtagattttggagaataataatttttaaaaccaaagaacatgctttttttttttttttttttgagacagagtctcactctgttgcccaggctagagtgcagtggcatggcgcgatcttggctcactgcaatctctgcctcccgggttcaagcgattctcatgcctcagcctcctgagtagcttggactacaggtgcaggccaccacacccagttaatttttttttttttttttttttttgtattttcagtagagacggagtttcaccgtgttagccaggatggtctcgatctcctgacctcatgatccacccgcctcagcctcccaaagtgatgggattacaggcgtgagccaccatgcctggccaagaacatgctttttaaaagaaatataattcatttagacttctctcccaacttcaagtgaaaagattacaaattaaaaaccttaaattactatctattgcatatatattaaaatctaacattaaaaaatatggaaagatgtcaacacatttaatgaaaacaaaaaactttaacagaggtaagtattgtatatttatttgtctattactttgcttaagcagtctgcttgctaatataaggacattttccttacctataagagtaacgtatttccaaaataatgttttcatggccaaaaaaaagcataacgcttgcttcatcttctgaataaacaagtgtgtttaatttcctgagtaaacattagtcatagttgacactgaacagcgtccaaattcaaggaaggagttaagaaatttctaaaaccccaagagcaatatacctcacccagagaatctagtgaagagcttattataaaggactaaaagtcaatgtcataccaaaattttaaataacatcatgcatccctctacttaataaattatttcaaaatcaggtcacaattgacagacacactatcttgggcagacgggagagactagataagcagggaaaatttccttttctctactgaagcatgtccaccaactgtcatatctggaaaacagccaaaatgagcactttatttgcaaaaagaacaggagatttataatgtgagcaaaatgtgtgctatataaatgcagaatatagagaattattttaagattcatatttctgtatgtttagaaataatgtttcaaagacgtagattaaaaccacaagttcatctatataaaaagctctaaaagccaagggtggcaacgcttaaatccctatagataagctttacccttttcttctgggctgtgaccatctatgcgaggtaaggtttccttataaacttctaagacagataatctggcctcacaggtatctaaatgaattagccacataaattactctgagaaaaccacagccaaatcatgtctctcttaaccttcctttccttctgctccctaaccctctgttttctctttagtcacagagcattttctagtttcctgaccacggggtttaccagccaaagctgacacagctgagttgagaagggaaagcagctgaactataaaggaaggaaatcagagagaaaagaggcagggagtctggaaatgctaactagaggggaaataagaaaaccctggactgtgtctgaatctgtagaaacttgcaactctagattaatgtcctcaactcaggtgttggcggcccttagtcaactaagggtttgcgaaaattttccaaatgggttcctcgctaatctaaaataaatacatattaaaaatagtaataatggcagagtctcaataacatttatagccaataaccagggaaaaggaagggtaggcattcattttgagtgactttactattggaaactcctggacagttacagcattgctattaacacaattgtcactttggataaggtgtccaactgcatcacacagtattttggttctttaaagaagttaggggctgggcatgatggctcacacctgtaatcccagcattttgagaggccgaggcggacggatcatctgaggtcaggaattcaagaccagcccggccaacatggtgaaactccatctctactaaaaataccaaaaattagccaggcgtggtgacaggcgcctgtagtctcagctactcaggaggctgaggcaggagaattgtttgaacccaggaggcagaggttgcagtgagcccagattgtgccactgcactccagcctgggcagcagagtgagactccctctcaaaaaaaacaaaacaaaacaaaacaagacaaaacaaacaacaaaacaaatgaagtgagagaatttaaacagaaaggaagtgggaaaggtaaggtgaagaaagacttctggtttgagtgtattctcttaaaaagttcacaaaatcgctgaggtaataaacatttttccacatgcctcttttctgagattttgtccaccttctcctccagccatgaggtggggctcaaggagactcagcagcccctagtttatgctacaagatcctatctccctgccttcccctcatcctcactgccttgattcctggtcttttcaaggcctggcagttcaacatttccttgattctatgaaagacttctatagtcataaattcccattcccctttaaagaaaaagcaagcaagacctccaaggaaggatatattaaacatggatcttgtacccttttctgcaactcctttcatcagtgagatgatgataatactatagattagattgtggagaaaataggtatctatccatcccaagagtcaagagttttggagggatttttaaaggtaatccaggaacaaataggataggtactctgcatgttcccttgttctgctgatgaatgtcacaaaatacaaagtttacgaagcatttctatggacacccaaggacaccataaaaacagaaagccaagatacaaatactttgaaatactgtgaaaaggtcctacgttattagaggtattgataagaaaacaagatgttaagaaaagagtagaaatcacgatctctttagatccctagatgttttcttgtgtattaagtatgacattttttaaatccaggctggtttagttgtttttttttaattttactttaagttccaggatatgtgtgcagaacgtgcaggtttgttacataggtatacatgtgccatggtggtttgctgcacctattgacccgtcctctaagttctcttccctaaccctcccacccccatcaggccctggtgtgtgttgttcccctccctgtgtccatgtgttctcattgctcaactcccacttataaatgagaacatgcagtttggttttctgttcccgtgttagtttgctgaggatgacggcttccagcttcatccatgtcctgcaaaggacatgatctcattcctttttattttatggctgtatagtattccatggtgcatatgtaccacattttctttatccagtctatcattgatgggcatttgggttggttccatgacttcgagattgtaaatagtgctgcaataaacatacgtgtgcatgtacctttatagaatgatttatattcctttgagtatatacccagtaatggtattgctgggtcaaatggtatttctggttctagatccttgaggaatcaccacactgtcttcaacaatgattgaactaatttatatgcccaccaacagtgtaaaagcttcctatttctccacagtctggccagcatctattgtctcttgactttttaataatcaccattctgactggcatgagatggtatttcattgtggttttgatttgcatttctctaatgatcagtgatgttgagctttttttttttttttttttttgagacggagtctcgctctgtcgcccaggctggagtgcagtggcatgatctcggctcactgccggctccgcctcccgggctcacgccattctcctgcctcagcctccggagtagctgggactacaggcgcccaccaccacacccggagaattttttgtatttttagtggagacggggtttcaccgtgttagccagaatggtctcgatctcctgacctcgtgatgcacccacctcggcctcccaaagtgctgggattacaggcgtgagccactgtgcccggccgatgttgagcttttttacccgtgtgttggccacgtaaatgtcttcttttgagaagcgtctgttcatatcctttgcccactttctgatggggttttttcttgtaaatttgtttaagttccttgtaaattctggctattagacctttgtcagatgggtagattgcaaaaattttctcccattctgtaggctgcctgttcactccgatgatagtttctttcattgtgcagaagctctttagtttaattagatcccatttgtcaagagttctcttcttaaggtagtaaaactaaaattcagatcatctttccattgagtttgttttcccaaacctagggaaggagagcaggaactggtaatagtgcctgctgtttattttttcttaaatgtggcatgcaaagctgaatgatcttttaaagtacagaatataactgcaatgaattatttctgcaatacttccaactatttttcccatttctttgcaattaatgatagcatttttttggctatagcaaatgtttactaaagagcttcctggacgtttctttgcttagatttatttctaggaattatagtttcctgatagtaacttaaagcttgggaaattcccagtatgaattacttactgtcctggttcatttgaagcaataatcatttttataagacctgtgcagatgtgccatattttataatatacttgtgtcaatttccagacatatttttatgacattttaaaaatcatagtgggaatatcatataacaagaaaaacctacttgctggaatccttatctctatcgaattctgcaaactcaacttcttcagtgaatgacagttaatatctcagttcttttataactctttttcggcattatcatcatcttactaaaattcttgagaatgcactttgctgataattatgataaagaaagaccttcagctaaacagcaaaaaaatatataaagattttctgtctctcattctggaggcctactacatgtccacaacactatacatgaaaaaaagcccattaaagaatgcaaagtgctgaccagcctatcaaattatcatcatctctcctccaaagtgcaaggagaaatagtatccaggagaattgccacacagtgctcatgctttggtcataatctgatgttacctaaaatcattaattgcccaattttcttccaatacaaggtacagccaatgctgactttgaaagagatattatcattgtcatcacctagataaaaagaagagcctcctccactttctcttccactccctattcctcttttccttccttctcatttcccttctcttcctgaaaaattcagttcctacactattaagtaacacagagaaaggtaggtgtccacatcagaggaaagatggaaggcacagtggaaaggtaggaggtgtgtccatattggggcaggcctagtgtggcgtaccatagcctaagtgagagggcatcccttctggcatgatatgagagggttagaacccacacagggtgaagagggtgcccatgtggtgatggcagaggggaacaccccagcatgggatgtcagtatccaaacagaatgagagggcatccacatgcaagggtgacctagtgcagggggattagagtccaagaaggatgaaaagattattcccctgtagatgcagaccaggagagagtcagatatgaaaagggtgaagaggtgtctctgcagaaggacagcctagtgtggggtgacagagcctaagagggaaaaggaggacattaacagaagggaggggacgatagtggagaggagattgatagcatataagacgacttatcaaataagtatatatacaaagataacagaagccagactggaggatgaaggaagttacaataaactcatatttttaataactatagagatgtaaatatgtgtacacagtgatgtgaatatattcactccctggctgagaggatctgggagatatgacactccaaaagccatgagcataacaatacccaaatcttagcttctaatggcccactttccaataaaaggaaccaggccacttggagaaaaggttgattccagggctaaggcaggaaaagatgagtcctggaacattttatgatgccaaaagcaaggaaatgctcaaggaatggctcaaaaaaaaagtcagcctaaaagggatcctactaagtctgagataatttaagcatcaaaattaataatgatagcagtgcattataacctaggcaataaaacagcaaaccatgagtccacactgatataaataaatgaataaaagaaagtttgatgaggaatgggatatctgcataaatgtacctccacacaaaatagttattaaagggggaaaaaggtaattatatatatagaagtttgacaaccaccatcataagcaagtgattaaaatgaacattatcagcaacgggacagatcaaatcccatgccacctgacaggatacaatgaaaagaacagagcatccctctgtggcattcccaccaaaggtgcacaacctgggccaggcacggtggctcacgccagtaatcccagcactctggatggccgaggcaggcagataacttgaggtcaggagttagagaccagcctggtcaacatggtgaaaccccgtctctactaaaaatacaaaaattaggcgcatatttgtagtcccagctactcaggaggctgaggcacaagaatcgcttgaacccgggaggcagagcttgcagtgagccaaaattgcgccactgcactccagcctgggcgacaaagtgagactgcatctccgaaaacaaccaaacatcaacaacaaaaaaagtgcacaacctgaatgtaataataagaaaacagcaggtaaacccaaagtgagggacatcttataaaataactggcttattgtctttgtgtcaagatcacaaaagtcaaagaaagactgagaaattattcacactcaagaagactaaggaggtatgacaactaaatgcagtacatgattttgaacttaatcccaataaagacattattgggacagttggcaaaacttgaatgggatctgaggaataaatggctgtaatgtgacaaagttaattttcttattttagtgactgtattgtggttaggtcgaagaatgtccttgtctgtaggaaatacaaactaaagtattctggggtgattaggttgacaacttacttgcaaatggttcggggaaaaaaaaggttatttaaactatatttccagattttccataatatgtgattatttcaaaataaattttaattttaaaaataaaaatatttgacagtatgtagttctacctccaaacattaaagaattacctgaacctgactcatggtcggatttagatctgatgtatgatgggagatgagagccaaatgctgacaccagactgctcaaacgaaaaagctaaatttgtgagtttttatgccctagtaaaattagatactactgtatagttagctattatctcatgtaaatgatttttgtaagggcctagagagaagagtctattttccagcctccaaagcaccatcaccatactaaatgcatagtgtacacctcaagatatttccataccataaaaatatgtctcaaaatattttaatgcttttaaaaaggagaaaatagtaatgataggcttactaggaacccattaatctcatggattacagcacagcacatacaacttccgtggaacacaatttttttctgttcaagttatctttgtgaggaatgtacaagatagaaaacaaatactaaatctttggtgaccagtaccactcctaaaagcaaaaggaaaaaagcaatcctctgcctctgggatcagaggaagattggccaagcagtgtcactccctatggcctgtcttggtgcctacagttacaccattaaagatttaggttaagacagtgtaaacaaatgacttattataatgcaaatattccagagtttcccattcaataaaagatactcatgaaatatataattatgatttataattatgaataatttattgaatatctaaattatttattgcatagatattaatgcttagtaataataagcattttatttcctcctgtgtaataggcactgtgatagatattttatataaattatctttaaccattccaactctacaagatagatgttatcacctccactttataaataaggaaactgaagcccaaagaagttaaatcacctgcatagcgccaaatgtcctttcagttgcagagtctgcattcaaactcaagactcggaatttttccattacggttttttcttttcttagagattgggtcttgctctgttacccaggctggagtgcagtggtgtaatcatagttcacagcagcctcaaactcctgggctcaagcaatcctcccgcctcagcctcccaagtcacagggattacaggtacaagtcactccattacattctgcttcttctttcactatgtaatttactattctgaaaaatagaacctggcgcagtggctcacacctgtaatcccagcactttgggaggctgaggcgggcggatcacaagatcaggagatccagaacatcttggccaacatggtgaaacgccgtctctactaaaaatacaaaaattagctgggcatggtggtgcatgcctgtagtcccagctactctggaggctgaggcaggagaatcgcttgaacccaggaggcggaggttgcagtgagccgagatcacaccacggcactccagcctgggcgacaagggcgaaactccgtctcaaaaaaaaaaaaaaaagaaaaagaaaaaagaaaaatggagatctatggtatgagggaataaaatgccatataggaaagcttcttattggtacaggataaaactaaattatgagacttctgagtttggggtagaagaagccaaagaatgccttagaaccatgaaaggaagaaaggctaagcaaagggacataagggcacaggaagaggggatgagaaaggtctaaggacaaactgcctggttccccagttttcctacacagcctaacactagagttgacaaaagtccctgaattaataatgagctcagttaaaaacgacaggcttagatttattggcctgaaagagatggatcataaatgagggctgtgggctgggtgtggtggctgacgcctgtaatcccagcactttgggaggccgagacggatggatcacgaggtcaggaaatcgagaccatttggctaacacagtgaaatcccgtctctactaaaaatacaaaaaaaaatagcccggtgtggtggcgggcgcctgtagtcccggctactcgggaggctgaggcaggagaatggcgtgaaccctggaggcggcacttgcagtgagccaagatcgtgccactgcactccagcctgggcaaaagaccgagcctctgtctcaatcaatcaatcaatcaatcaatcaatcaatcaatgctgtggtgaacactgtactttccttctttgtgtgaaaggaatgaggacaaataaatcccacgtacatggtttagatgtttgttccctccaaatctcataccgaaatgtggttcccagtgttggaggtggggtctggtgggaggtgcttggatcatgggagtggacccctcatgaacggcttagcagcatccccttggtgatgactgagttctccaaatttacatgaaatctggttgtttaaaagtgtgtggcacctccctgctctctctcttgcccctggtctcaccattttatacactggctcacctttgccttctgccgtgattggaagcttcctgaggcctcacctgaagcagatgccagcaccatgcttccagtacagcctgcagaaccctgagccaattaaacctcttttctttataaattatccagcctcaggtatttctttatagcaacacaagaactgacacactcgcccatctggaaacatgggatggacaagttattaaaatacctttgaagacaatagaagttagacaatatcaagcacctagaattttgggggtaaaaaattccacactgggtttttgtgggggttgttctggttcaggtttttttctttttgcccaggctggagtacagtggcatgatcatagctcactgtagacttgaactcctgggctcaagcaatgcttctacctcatccccctgagtagctaggactataggtatgcgctaccacacccagctatttttatttttttattttctgtagaaacaggatcttattatgttgcccagcctggtcttgaactccttggctcaagcaatcctcccgcctcagcctcccagagtgctgggattacgggtgtgagtcaacacacctggactaacactgtatatagtgaaaataactgacaagggcatatttttaaaatgtctttaggtgatttactttaccactcagttcagtttactgttcatgtgctatcaagaaacaaatttaaagcaaaatactgccaataatatgaaactgataagcacacaaaaataattgagaactatgtaggaactgaaatatattactatataattttgtagaaaatgtactttccatttacatgttggaaatatattggtatattcatattttaacataagatatgcattgatccctatggcactaggaagcaatacagcacaattgaaagatatctgggatcagaaacacctgaatttgcttcttgaatctgcatgagtactgattataaaactactgactttgtaactctgggcaagttattcaatttttctaaccttttcacccataaataaaaatggggaagacattgcaagacttgtaaagattgaagaatataattttatgtaaaaaaagtggcctgtgtgatgtttacaacattgcttataataataataaagtcaaaaatcatccaagtatctatcattaagaaaatattaagtaacaacagtatatacaccagattagtggttctcaaattttagtgcacataagaatgttctagggggttgtaaaatgcatatttccaggccttacacttagaaattcttagaatactcagaaatcctggggtgggatcaggaaataacacgtttaacaaacaaccataggtgcttctgatggaggacatctatgaaaagtatgcagtagatggaatacgatgatgccattaaaaataactatgaagactttgaaatagcattgaaaaggtgtatgatatacccttaagtgaaaaattcaggatccaaacttgtacgctttatctgataactacattaaacatgcttaagaaaaaagttgtttttagcaataagattaaaggtaatttttgatcttttactcaaagttttaaatagtcatgctattattataaatgaatcactaacacattaaaattgaaaaaaaaaaacacattggatcctcatggccttcaggattaggctcaaactccttagggcaacacacaaggtccttctatctccagacttagctcttgtccatgctccatatcaaactacttataataccccaagctatattctatattttcacacactattattgaatatactgttccttctgcctgaaatgccctttctccaacttgtctggaaaattcctattcatcccacaagattcaagcactacctcctctctgcagtttcccctgaatactcctccaagtcaaattctgggtgcctccttcttgctcctagtattcctacagcattatttggtatttccattgctccatatatcaccctgtattttacctttttgctgatagatctatcccattattctgcaagtacatggggtaggtagagatgatctcatttagttttagaatccacaaagtactcagcaaatacttgttaaaataagtaaagacctattttttgttatcactgttcttagttatcagttttctaaaaaatcctgagtgccctgctggttagttggataacacttggctcaatgattaatgagctttgtctaatatatacatatatatatacacacacacgtagcataaaacaaacccatgaaaaatttttaagaaatagtttaaccattgtttgtaattcttcacgttctctgcttatgtcttcaaagtttctatcaaccttcaggatgacagaccactctggtcaatagccaaagcaggctaacaggaataactctgctctgggctcctccattgctggagtttacccagccaaagaacatccctgcagaattcttgctgcttcccccaaacacactcccactcactgccatctccgcactagcagtaaaatatctatataaaacagagataattctgtaagtaaatagagcagttttttagtatattcaaaacactagatactatatttagtatatttgtgtaatacataaaacatttcaaatgcagattactaactagaggtaccaaacaagaacctaaagtgactaatagtaattcaggccaaaaaaaaaaaaaagaaagaaaaatcaatgtggaagaatactaattgagatccaggtatcagaacttcaaatgctttccctgtaccgtaaaacataagttttaggaataacctggatgctgaagccaacttgcaacacaatttttttaaaaagaaaaacaaaatacattttttaacatttgaatctcaagccacattaggcattaaagctgtgatacaactttgttccatatctctgtcacctgtgatataataaatgtgtacagaaatacttttagtgcacacttcatagatactgtacttttttaaaaattgaagatttataggaaccatgtgtctaacaagtccatttttccaattaggccaatgtgctcagttcatgtctctgtgtcacatgttggtaattctcacaatatttcaaactgtttcattatttttatatctgttatgatcatctgtgaactgaataatgctgtgtgtgttctcaccactccaccaactggccattccatctctctccctctccttgggcctccctattccctcggatacaacaatattaaaattaggccaatgaataacccttcactgacctataagtgttcaagtgaaaggaagagtcacacgtttctcactttaaacgaaaagctagaaatgaataaacttagtgaggaaagcatgttaaaagtcgagacagactgaaagctaggcctcttatgcctaacagttagccaagctgcaaatgcaaaggaaaagttcatgaaggaaatgaaaagtgctactccagtgaacacatgaatgataagaaagccgaagagccttattgctgatatggagaaagtttgaggggtctggatagaagatcataacagcaacacaacattcccttaaggcaaagcctaatccagagcaaggccctaactctcttcaattccatcaagagctgatggagctggggaagctgcagaagaaaaatctgaaggtagcagaggttcagggggcttaaggaaaaaagccatctccatgacataaaatggcaaggtgaagtagttaaatgctgatgcagaagctgcagcaagttatccagaagatctagctaagataattgataaaggtgactacactaaacaacaaaatttcagtgtagatgaaacagccttctattggaagaagatgccatctaggactttcatagctaaagagaagtcactgcctggcttcaaagcttcaaaggacaggctctcttgttaggggttaatgtagctggtgactttaacttgaaaccaatgcttatttaccattccaaaaatcctagggcccttaaaaatgatgccaaatctactgtgcctgtgctctgcaagtggcacaacaaagcctggatgacagcacatctgtttgtagcatggtttactgaatattttaagcccaatgttgagacctaccactcacagaaaaaaagattcccttcaaaatattacagctcagtggcagtgcactagtcacacaagagctctgatggagatgtacaagagactagtgttgtttccatgcctgctaacacaacatccattctgtagcccagagattgaggagtaattttggctttcaagtcttcttatttaagaaatacattttgtaaggttatagctgccatacctagtggtagctatagaaccactaagaacatttgcgggccaggtgcagtggcccatgcctgtaatcccaacactttgggaggccaaggtgggaggatcacttgagcccagaagttcaagaccagtctgggcaacatagggaaaccctgtctctacaaaaaatttaaaaattatccaggcttggtagcacatgcctgtggtcccagctacacaggaggctgaaagcaaagaatcactgagtctgggaggtcaaggctgcagtgagcacagtgatcatgccactgcactccaggcctgggtgacagagtgagaccctatcacaaataaatagataaaacatttgtggttcatgggaggaggccaacattaacaggagttttggaagaagttgattctaactcttatgactgattttgagggattcatgatttcaacagaggaaggaactgcagatgtggtggaaatagcaagtgaaatagaagtgaagcctgaaaattggactaactgacaacaatctcatgataaaatttgaacagataaggagttgcttcttatggataagcaaagaaagtggtttcacgagtggaatcgactcctggtgaagacactgtgaacattgctgaaacatcaacaaaggatttataacataacataaataaagcagcagcaaggcttgagaggagtgactccagtgactccaattttgaaagttctaccatgggtaaaatgctatcaaacagcatcccatgctacggaaacatcttttgtgaaaggaacagtcaactaatgtgaaacttcattactgtctcatttaagaaattgccacagccatcccaaccttcagcaaccaccattctaatcagtcaccagccaacaacattgagacaagaccttctaccagcaaaaggattacaacttgctgaaggctcaaatgatcattagcatttttagcaatgaagtattttttaattacgtacattgttttgttagatataaggatgttgcacacttaacagtacaatatagtgtaaacataacttttatatgcactggataaccaaaaattttgtatgactcactttattgcagtggtctgaaaacaaatccacaatatgtctgagctatgcctgtacatctaagtaataacgtctgatataggcaaataatatatgtttatatctaaaatgggtttatataatccaataaaaaattctagagactaaatgagtagcaaaaagaaaatacttttctatcaccagccatatactctctcatttctcatgtctccagtcaaatcccttccccttcagcctttaagaaggaagaattagccaggcatggtggttcacacctataatcccagaactttgggaggccaagtcaggaggatggcttgatcccaggagttcgagaccaacccaggagttcaagaacagcaaggcaggaggatcacttgagccctcaacaacagaccccaacagacagggtttccctatgttgcccaagttggtcttgaactcctggattcaagtgatcctcctaccttggcctcccaaagagctgggattacgggcatgagccactgtgcctggcccacaaatgttcttaatggtgtctagcatggtcaatcctttccagaaggttttcaatttactttgcacagattcatcagaagaatcactatgtatggcaggagtttgaggaacagtgaggctctgtccttataaaaaaaaatcaaaaaattggttgggcatggtggcacatgctggtagtcccagctacttggggtctaagacatgagaatcacttgaccctggggggcaatgaggctgcagtaagctgtgattgcaccacagcaccccggcctgggtgacagagtgagaacttgtctccaaaaaaatggaagaattaccacctgtatccaacattctcttacgagcctggcaaaatccactccatttgttctgccagaagaggtcgatggctttactattttggcctaatgttttgttgcctctttaaatgaaaatacgaaaagagctgcttctttctaaaagctttaccaatcaattacaacttcactatgaattaactgtcaggtcccacaaacactttttggtggtaaagaaaggaaagaaaaggcactgggtccatgacgttagaggataaattaacattgaggtataagcattccctttcctctgcagcctcaccagcatctattgtctttcgacttttaaataacagccattctgactagtgtgagatgctatctctcactgtggttttgatttgcatttctctgataactagtgatgctgagcattttttatgtttgttggccacttgtatgtcttcttttgagaaatgtctgttcatgtactttactcattttttaatagagttacttgttttttgcttgttgacttaagttccctatagcttctggatattaggcctttgtcagatacacagattgcaaatatcttctcccattctgtaggttgtctgtcagtgtggaaggtagtacagagatttctcaaagaacctaaaattgctaccattcgacccagcaatcccattgctgtgtatatacccaaaagaaaataaatcattctaccaaaaagacacatgcattcatgttcattgctgtgctatgcacaatagcaaagacatggaatcaatctagatgcccatcaatggtagactggacaagaaaatgtggtacatatacaccatggaatactaggtagccataaaaaagaatgaatccatgtcctctgcagcaacatggatggagctggaggccataatcctaagaaaattaacacaggaacagaagaccaaataccacatgttctcacttataagtgggagctaaatataaagcatatgtggacataaataagggaacgaaagacacagtggactactagagggtggaaggggggtagattaaaaaacagcctattaggtactatgctcactacctaggtgacaggatccatgctccaaacctcagtgtcatgcaatatttccatgtaactaatctacatacatacttcctgtatctaaaatctgttgaaaattttttttaaatattcagataggctggaatctagagatgatgccagctggcacaaaaactggagccagggtgaacttgtagtaattagaaaaaaacgctttttttctgagatgtgattgaggagggttaaagggaatgtggtgtgggaaatagaaacaggaaaggaggttggctgtttatgctcacatccatcaatcaagatttgatccaatttgatcaaagaatggtaacaagtctaagcagtttgtttcagttcagttaactagaagtgattaaccacttcaaataaagctactctcataacacaatagaatccaaataactctactgcacagcttaatcaaagttccatttcacaactagatccatgaagacatgtcatttaataagaaacatgattcataagaatcagattcagagatgaacactctggacagtgcagtagaagaaacagagtgtcttagtctattttgtgttcctataagagagtacctgagactgggtagtttacaaacaatgtatgtttttgtgattcacatttctggatgctgggaagtaaaagagcatggtactagcatttgctcagcatttggtgaggaccttcttattgcatcatcccatggcagaaggcagaagggcaagcaagcatgggcaacagaaagaggaaattgggctgaactcattattttgtgaggagcctcccatgacacctaacccactcccacaataatggcattaatccattcatacatgcagagccctcatggcctaatcacctctaaaagatctcacctgtttgttttgtttttattttgagtagggtctcactctgtcacctaggctggagttcaggggcatgatcattgctcactgcagcctcaaactcctgggttcaagcaattctccccacccagcctctcaagtagttggggctacagacgtgcaatgccacacctggccattttgttttgttttgttttttatagagacagggtctcactatgttgcctaggctattcttgaacccctggcctcaagtgatactcccgtctcagcctcccaaagcctgcgattacaggtgtgagccaccacgtccagacagatcccatctcttcatactgtcacaatgacaaataaatttcaacatgagttttggagacaacactcaaatcatagcactgtggaaaacaaaatttatcctttggtcatattttttgatccatcttcaaatatcaattaaaagcctcatccagatttaacacaaatgtaaaatgtatttgatatcctactgacaccaaagaagaaaagtagactcttaagaaaagtttctagatctgtattacacaagaaaattcaatgagttttcaactggcattgtgcctctgcctgcccgtacggcttacataaccatgtcctcacatgcatgagaaagaactggaagatagaagcgtcttctttgtaaattcctttttcaaatataaaatattctcccatatcaacatatgatgagtaataaaaactcactgtattttaattaactaacatcattctgcaatatgtccaaaacggaaactaaagacactctaaaatgcattaagtgttaaatatcttcaggttccataggttgaaattagtcttttctaacctttgtctggcattatagtcagcttccatttctagttaaatactcaggaataatgttctatcataggcttctgatagaattttccaaaattacctcaaaattatttcagtatataactgaactaatcaaattgtttactgtcacctgaaaggttaagttgctaaagtcagcagaggcactaataaatattatatgcttctgccttaatgtcagtgaagacttgcatcagcctttgtcatctgtaagaaatcgagtcacacaagaaactgtgcaatggatggacaggttgagtagtagtcactggctggctgccctagttcactgctacacatcaccctcagtgttttgaaaagggagctgaaaaccctgctcagtggagaaagaggtcaataccaaaattcaccctcctttctccttactccccatcatgcagctggcactgttcactctggcagatacagctccctgaacataatggtgcaatcaccacttcaaacatcattactatctaaaatagataacccacttgcaacttgactatttttatagatataacattttcatggagcttaactgctctatttgtgatttattccatttaaccaatgcagtttccctgaaagtgagtttcttatatcagggtcccaataaccacaattgcccaaatagttgtgaaaattacagtacttcctagttgtctgttatctccctgtattcatcaccaaaatgacatgagctgaatcctaaatctgaaaaattataagctctctggtttttatgtttttggtgaccagaagattgttttgctccacttcttattgatctactttttcacatggggatcttaagaactgtattatttatttctgacaagaatttactaaatacaccttatataaaactcaactcttcgaggcattaagaaaatcaaataaattgaggcattaataaagttttatcactgtattaaaatacaaataattctctatcctatactcagcaaaaaattaattaaatatacattttaaatggaaattagttttgtttagaataaaaggtagttgtgccaaaggaagagaggtttttttttaagattttgcagctgtctcataaaagatatgttaaataaactgaaatttcacataaaatgtagaggaagaaaaggagggaggcaactcaattttagtgctctgatgagctcagatttctttaaggatgaaagggggtagtaagaggtataactgcaagcaaacacaaaaaaagaaatatatacttgtccaggaaaaatgctaatgtcctttttagctaagtttgaaaaagagaaaagaggtgtaacagttcactaatttcaccttcagttctggcagagtaaaaggaaaactgtgggtagttttaaaccacaagataattttctatgatatctaacaatgccaagaatctaattcttcccaacttttattttgcttctattttccctattgagaaccattttcaaatcagaagggataaacaaataacttcaggagattactgaaggtccaaacgagaccataagggacagtaagctgctttaaataagtatgcatatccagacccagaagaattagatgcaagagggtagaaggaatttttgccaatactaggaattaccaatggctcactgccagaaacaagccataataaagtagactgattttgatggaatttaaaggatagatcaaaagaatgccatacacttaaatacagtgtgaatttagaaaggcagtagataaaatacctcacaatattctcacaggaacaatggagagaaatagctgattgtcattgcgtggcttcaatcctggtagaaataccatgagtaaagactgttacttttaaatttatactaagttgaagagaggtgctttggggatatagcacagtgtgttgaatttaggttatagaaaacatgcttattacatctctggatgatacaggggagagaagttaatacgctgaaagacagactcaagagtcagaaagaagaaaaaaaagagtcaaaaagatatagagaaattacaaatacaacataaaacaaatcagataaaaaggaacaggaataatttaagctcaatcaacacttttaaaagtaccagaaaggggacctggcttcacaggtcattgaaaaaaaaaaataccaggaaattttaattgactgtatgttcaacatgagccaacaccattacatggcccagaaaatcttgacctgtaggtaggtcttagatcaataataaagagataataatttcattgtatcatgttttaatagctgctattttattttaattacataatacatattcattacagaacactgaaaataaagcccaaccacaattccaccactcaaagatgaatactatcttcattttggcatcttatcattccagacttcttaagcacattataagtgttcaaacaaacttattttttcttgcaaaaataagatcatactataaatgcttcttgtaacctgctgtccttggttttcttattcagccataatgttctactctggtcaagggacatctactgcattttgtgaatttctagtcaccatactttaagagggtcattgcaaaatttgagaatatgtaaagaaggaaagagagagtagagaaaagtatgaaaactaagttcttaacatctatgctgtcttgccatataaaaggttaacagagatgatagctcttccatgaaaaatacttataagaaaacaaaaatacatgcatctaaagaactatcctgcagatgaattagactgctttatattgacccatacagccaatctactaccaattgctgaaagtcacagggaagtggattttagctcaatgaaaagaaaaattttaaaataattacagctgtcaaaaatagaatgaatctagtcattggaaggtttaacagggctggaataactaacaggtaagaaatgttacagagaaaatttccgcactaggtgagaagttggaagaaagttccctccttatttgacgattctatgattgctatgggaaatttactcccagtccaataggaagcaaatctttagtcattaaggccttaaagaatacagtcaagtgctttagaggtgcatgaaaaatattaacactaacgatgaacacctatatgctaaatgttttgcattcattactttatacttcatttaatccttataatgatcttatatgataggtactattattactatttccactctgatagaatagtgaggcttagagaggtttttaaatttattcaatggcattcttacatttgctgaaaattgcagtgccacccaaaagcatacctgattccccattacatagttactgttgaaaggataatttcttattaccagtagataacaagtaatcagaagcatcttcagaaaagttcttgtctagtgaaccctcaaagggcagttgtgagatttttttaattagaaaaaaataccaaaatttaaggaatttcaaattattcttcatagcaaaaaatgttcagattggcctgtctaaattggccacatacctttaaacttttgtgaataaaacagattcaatgaatgagacttaaaatgttgtaaaacaaatctgaatcacagattttcaaatctttgccattattaattaagtgaccatgggcaagtccttaatcttatctttttattccttcatctgtgaaatgacaatggacctcctaaggctgacacaagaattgaatgagatgacacgtgtaagcacttagcatagggtctgacaccattattacacaacccaggtaataaagcaagcggggaaaaagtgccaaacatattctacagttccttctaaaacattaagaaatttcaaagtgtcattatgtttgacgggggacacattttccattatcctgccaataaatttctgatgacaatcatttttgaaataaagtgacaactaaataaaatgtgccttcttaggaatgtcattttatgcaaatgattgcccaaagaatacaatttcaactctcattttcttcagacactattcagtataagatggataaaagcaagtttaaaggttattggttttgtttgtgatttttacaacttggttcgaagtactctaataaacacatgttgtttacttttgttttctatgtgcaatctttgttgtagagctactactactactactacaccagcaaaagagaaaacctctcactcaagatatacactgtgggtcactattttgatactttagtgtccactaacattaaatacttggtgttttatccctaaaacttgacatctattctttaaaaaaaaaaaaaaaaatcacagctgggaaaggagtatttaaaggatgtttgcttttgagttttgtcacaaggagtgtttttaaaatacgatttatcacaataaaattaagtgaaattctcactgttctcaaataattcctcatgttttcccgaagaaattgtttattttgagaaaattctttcagcataccagtttttagacataatcatttttataactgatggatccacagcaaacgttgttattttacgtgtaacttaaaactgtaaagagataaattgctttcacataaactacatgtgactacaggcaattattagagctgcaatctgaaatatgcacacattgtctacctgtgtttgaaagagaagattatttaacaagggagtacacacaagtcatctctatgacctattgaaaaaatgtcccataaatattcattcttctgacatgaactatcattccaataaaatgtcactgtcaacgagtatatagaataacatatggggctttttaaaatcccatcgactatttttcaactcaatttatttcactgtaatagaaactttccattttcccttttagctagccctataattaattgcactgtctgaccaccacaacctatgagaacttgtgtaaagaacgcaatgtcatcacccaaaagtttctattaagcacttgtcaagggtagcatggaacagtttttaaaaaaccagggaaatcacttgggctttctaaaatttttacaactatagttgggttatccaagagatgttttaaggcgaagatatgaatgacaattgatgactccaaaaatacccaggataaattggatagccacgattttagaaactaaagagcttcccttgaattgtatctagtgaatactctccaggcttcctccctcccagttgatttcatttgtccatcaatacaacttttaatagtttctcaagtatggaaatcaaccccgctatttccaaggtactgctgaatgaagaccttgacattttttttaaatgtcatcttagaaagattctccaagcaataccagtctcacctacgacatcttcacgttaaaaggcctctaccgtactccatatacagtatcccaataccaacctggcatccttcatcctgagctataacaaccaagtttcactcagctatgtccaggtaactgaaagtattgctggggctgcctaacctgccccatcaagttttatacacaccctgtgctgaagacatctcaccagaaagaaggttcactcacttcattttgtgggatcataacccacggcacagcaaacgccttctgcaagagaaggtaggagccaccgaaggctgtggcttttgcagggtaattgcatgcacgcaagagattctctgccaatttcatttaactagacaaaaaaggctgcgttcaaagctgcaaatatgtaataaatgttgatggaaagcgggcggaacgtcgattttcttcaagcaacactagtacatgtacaagttctgcaccagggctcagaggaaaagtagcttactgacgcattgatggaaggctattttaaaattactcaaagaatctaaggcatcaatctgactgggaggctcatacctcctctccatacacgcagtctgttttcctacctaatttaagaatgaatcgctggcagccaccaggtgcaataaccgtgaggaggaggacgtatatccatcacaatgcataatgaggtgtgccaaccccggagctggtgcccgtccttaccttagcagattagacaggggcaggggtccggatccaccgcccaggatccctcctttcctgccagacaggagtttctccaccagagccacatttccagtgcgagcagcttccagcagctcctggtccttccccatagtctctcaccgactcccccacagagtccttgcccccctcgggtcctcctccccacccacccccactccccaaaatccagggccctcttcgccccaccctaaaataatgcaagagcttcagcacggagagctccctgcagccccaggcagggagcacgactctctcctcctcttcggggcgcagcttttacaatggggatcagaccatgtcttgaaagaggggctggccgagctgggagccgcgacgcgcccccacagccactcccctgaattcccaaggcctcgttcccgcgggtgcggcgtgagggggtggggactcgggggtgcttttgaggagcgggaggagggtggtgaggactgaggtcggaggaggaggaggaggcggcagagagagtcctagctggagcgggagcgcagggaacacccgcggtggcagcagcggcccgcgcgccctcgcgcccgacccgggctcgcctcggcttcctcggcggttacgcgggggcggcgtccgcggcggggaggagcgcggcggcggcggcggcggctcgtgcgctgtggcccgcgccgaggcagggcggtggggggcagccgcagcgggcgcgtgccgagggcggcggcggcggcgaggcctggcgcgcggggggcgtgtgcgcgcgggcaggtgcggcccctggtgcggcccgagttgggtggcgggctggcggggaggggccgggccggctgaggcggggcttcggccctgagattctcttcgttctcgtgggcggggaccctccctcctccactctccttggaagagcgttaaccgtgtgaggactggagttccccgggccgcgtcggctcctcctcggcccggcgggccccggcaacacgcctcgggtctgtcacgacgcctgaggaaaatcctccgtgacaggaatggggaggctggtgacactggggaggggccctttggccaccgcttccatcagagtctaggcaacttgaccggcatttcacccttccgctttacctccccaagagagcctgagatctgcccttggttagaaagaagaggctcgtttcgtcctagtttctgtggcactggccaccgagcagtttgcgactgtttcagtttttctggagtctttaatcagcccatattttagttgggctttggagatctgctgacttgtaagaataccaggaaaaaggctctcattgaaaatttatccacatctacactcgaaaaatataaatgggcatggattagagatccactttaatttgcatatatcatcagcaattcattgtgcatggttggcatgacttgttagatgctctccttggccgtggtggagaacgcgcgtttattttctattaaaacttcctgttacaccttgtgctttgcattgtccttggaatagacttcataaatgttcacttgttgataattgattggtaagaagaggacttaataggcactgtgcttacaacaacccagtgaactggatattattatatccattttagaaatgaggaaatagggctcaaatggttaattaaatttctcaagatgccacatggagtaagtggctgactcagaactagaccccagaacagactcactccagacaccatgtgcttcccaatatacgttcctgccccccatggaaaagcgaaatggacagacaataattattgcatgcatttgatgagtagttgctacataccagacactatgctaagtgctttccatgttctcattaagccttgcaacaatcgcatgagataggaccattttcatctctattttggagatgaagaaactgattacccgcaagataatagggatagaaagtaactgagccaaggctcaaatccggcactgtctgctgtaggcaaagattttcaataaataactgggggaaacttaaa

SEQ ID NO: 31 - DNA, 89436 bp, Homo sapiens
  source 1..89436: mol_type = genomic DNA
ggagagcagcccaggacccctcacatggcacaagatgctcttgtgtccagaatggcctttatttgttgtcagggacaggggagggaagcttcttggtggaagggagaggctgaagaatgaacagccccgggaccactttctctgccaggaggtggcactgggagaggatagggactccggaggggtgtaccgtcctccaggaagccctctgctgggtcggctccgtgcctctgtcttgggaagtgatggacttggttgccttatgctgactggggtctgtcacagatcttggttttccccaggagttctggaggcccagagcctgggtgcggcacccggttcattggggaggggcatgggtcctgtgccctcctcctggccgggctccaccagggctaagctctcatctggggctgcggaagtgagccagggtggggacaaagccctggctggtgggtctgggccagttccaggtacagggtccagatccccccactgcagcaggagggagcttcctgttcaaagccatctggctctgggaaggacagtgaggcagggccatctgcttccccactccctggggtctcttcctggccgggacctggagctgtgcagcctggcccagcaggtcctcccttgcgatgtgtccacaggggtgggcctaggcctccagcttgcagtggtgcagagggctggggagcagagggggccctggcaacagtggccaaaagtcctggcgccgccgagggactagattccgcaggggctgccgcccccggccgctgtcactggggtggggtgggtggttgtttctctgcaggcccaggtgatgtggagggggcacctgggctgccacacagaccctgggctgggtcgggcacggggcctgcctcgcccccagctcagggaccgcaagagatgtggccctggcggctcagggcggcaggaggggcgggccagccccaccgtctcaggataccgtgctaggggagggtttcctcgccaaaggccgtccagcggctgtgaccccttcgcctggagccccagcttcctcccggcgccgccctcccgccccggcccccgcggaacaaacaaggccctggcctcggagctgccccgccgcccagcgctcacaggtcgtttattccaagtaagaaaacggagactgctcggggcaagctagcggggccgaggcccaggacgaggccgtacgcgtgtgcctgcgtggccgcctcttttgcagtgaccaccaacaacgacagaggcggcccgctgcacacgcgggttcccgcccggacccacgcccttcccgtgggggacgcgggcggcatcgccagcttggcgcggccccgggacgcgaacgcgtggcttcagcggctccgtccatggtgtccgcctgcagggggcgcccccgcgcctgcctcgaccggctcgcccccgtgccgcggacgcgcgcgcgctgcctcacgcgacacccgccccggccgccgtccgtcgtcgctcgcgtgcgtgcgcgtgcgtgctggtgcgggcgccgtacgtgcgcgcgcgcggcggcccagaaagcggcgctgggaccctgaggcggccgtggttaggcggctccccggcggctcctccgcggcggtgacggcgaccgcactccccgcttcccgctccccgcgctcctccgcccgggtccgccagccgaggccgctcccgagcgtcggaagatgccggccgtgtccaagggggacgggatgcggggcctggcggtcttcatctcggatatccgcaactgtgagtggcgggggcggcgtggggccggggccggggccgccggcggagacggggtctgggagcggaggcccggggcggggcctcgaggcgggggtgcaggctgggatgcgggcggggcccggggcctgagggtgcgggcggcgctcggggtcttggggtaccgggtctgggggtgggggccagggtgcggggtgggggtccagggtctgggggtgcgggcggcgctcagagtcttggggtatcgggtatgggggtgcgggtcaggatgcagagcggggccctgggtctgggggtgcggggtggggtgtccagggtctaggggtgcggggtctaggggtttagggcacggcccttcatccacatctccactcccgtttgctggtccgtgcggggggctgcggcaccaccaagggggttccgggccaagacgcccctccccagcatgatgtcaccttggtctttctagtactggagcgtttaacccagcgttttccaaaacggcgtggattttagctttgggagcagaaatctggaaatcagtgtcttcccaggaaacagctttgtgacctgggttctggaggcttattaacccctgattagatctcacctacgacgattaaaatgactcattcccggagggaatctggacacgagcagcagtcggggtgtgggatggcctcgctgcctgctgctccaatcacagacctcgttctcagccccgtgcctgtcccctcggggtgggaaaaatccacaccaaaccgttaaacaagccaggaaggctgggcctgttagaaggatgtgcagggtggctgggtgggtgcaccggtccaccaattaatttgactttggtgtgcagaacctcctcttggctttcagaggccatctccttatttaatttgagggagaaacaaagccagtttcctgtctgctgcgttgatttttttccttgttatccagcaaatagttgacttcatgatttttgtttttcttttttttgagacagggtcttgctctggctctcaggctggagcgcagtagttccatcacggcgcactcaacctcccacctcaagtgatcctaccacctcagcctccggagtcactgggactacaagcgtgcaccaccaccatgcctggctgattttcgtgttttttgtagagatgggggggtctcgccatgttgcctaggctggtctcgaaatcctgagctcaagtgatccacctgtcttggcctcccaaagtcctggggttactggcgtgagccacggcaccctcataatttttaatgtgtattttgagggactgttgtgatcttccctttgaattctcatctccttagacgggatggaggatcaggaggatagtggttctcccacactctgtggaagggtagaggaccatctaacccttcctgtactctgttaaaaaaaaaaaaaaaaagcatagagctgggtgcggtggctcaaacctatagtcccagcattttgggaggctgaggcaggtggatcttttgagcccagaagtttgagaccagcctgggcaatgtggtaacaccctgtctctacaaaaaaatacgaaaattagctgggcgtattggtgtacacatctatagtcccagctacttgggaggctgagagaggaggatcacttgaccccaggaggttaaggctgcagtgagctgagatcgcgccatactccagcctgggtgacagagtgagacctttctcacaaaaaaaaaaaaaaaaaaaaaaaaggcttagaaacaccctcagatcagcacttttacgagtagcattttttctctttgtttgttacataatgagaccaacatgcattttgtaaaactaagtgtgtgtattatttcttaaggggacctctgggacaaagactgagtacccttaaatgcgctatgatgtctgtccttccatttttgaagaaaattgcgttaggcaggacaatgagattgaaagccatttcctcagacagcaagtcacccacttgtcagatatattgtctgtgccagggcctgcgtttgacaggatggcgcctaccacagtgagtgcggtatagccgtcctcccttatttgtggtttcaccttctgaggtttcagttacctctggtgatctgaaaataggtgagcatagtacaataagatatttaaagagaccacattcatataacttttattacagtatatcattacagttcttttttattattggcttctgttaatctcttactgtgcctaatctgtaagttagactttttcataggtatgtgtgggaaaaaagcagcttgtataggatttagtatcatctgaagtttcaggcacccactgagtgccttggaacgtatacctgtggatatggggaaactgctgtactctataaaatacttgactatatagaccagactttctccaactcagcagagctgacatttggggctggatcacactttattgtggggaactgttctgtgccttttaggatgtttatagcagcaccagttgccttagttgtgataaggaacaatgtctccaggcattgacaaatgtgcccttagggcaaagttgtccgccgtcgagaaccactagtgtatcccattgaataacacagcccctcccctgaaggagctcgtagaagaaggggtgcttagtcctagctgggggagccaggtctctttaatacggcccctttctcggaatcctctttccctcattgctgttggatggcctctcatcagctgcagcgcccaccattctcctcctgggcagtgtcttcagcttgtggtgctgcttttcacctgagtggccccatctcccccactgccctctagggtggcctctacaaggtgcgcaccctatcttgctcatcacatttttcctgctgttctcctcatggcgagcgtctggcatgcgaggtgcatgccagagaagacctcacaaggaaggtgattcttgggcaattcaggcagaagaccaagaaggtattagaggaacagcaaataattaatgtatatacgtattgagttaatgaatgttggctggtgcctggagacgggattggagagccagccagggtttgagctgatctgaacttgacctccatgtcacaggcagaggggtccccgcttcccctttccctggccagctctgattttgtgtgctgttttcctgtcatgagagtgaatgataggagtagtcgggccctgtggaaagaggactctgagccaacagccaaggctcttgaccctgactctgcctcttagcagctgcatgagtggaggccactggccatggagcctcagtttccacagcggacagttgaagggctggattttcagctgaaatatcattaaagctgcgtgagtggaggccactagccacggagcctcagtttcctcagctgacgcttgaaggggcggattttgagctgaaatatcgttaaagcctgtttcagctccaaatttgcgtctttctgaccagtttcttaagttttcctcctttagcctgggcaatatagtgagacccctgtcttttcaaaagagaaaaaagaattagccaggcgtggtggcacgcacctgtggtcccagttactcagtgggctgaggtgagagcattgtctgagccctggaggttgaggctgccatgaactcggattgcgccactgcactccagcctgggcagcctgaggagcagattgagaccctgcctcaaaaaaaaagtttttcccctccaagacctggtgccagccgggtgcggtggctcacgcttgtaatcccagcactttgggaggctgaggtgggcggatcacctgaggtcaggagttcaagaccagcctagccaacatagggaaacactgtttccacaaaaatacaaacattagctgggcgtggtggcatgcacctgtagtcccagctactccgggggctgaggcggaagaatcgcttgaacccaggaggcggagcttgcagtgagctgagattgtgccattgcactccagcctgggtgacagagcgagactctgtctcaaaaaaaaaaaaaaaaaaaaaaagccctgtgccaagtatctgaggtagcggacagggagcatgtggacactaggatgctctgttttcacttcaagtaacccactcccagcagactggcttggggcattactcctcttagcataggcagcaatgaatatgctccaggatttgaaaaggtgcctcgtgtcaagctctgcccctcaaagttgtagcttttgtggctcaggtagtgaactaacttaatgtctcctaaaattaacttcatcctttctgattgacgtcaacccagcggccactgcatttggtcagcatgcattcagtgtgtgagagttaataaactgtttctttttttttaaattggcattaaaaaaattctagtccttttatttagtcccagttttagaatttttttttttttgagacggagttgcgctctgtcgcccaggctggagtgcagtggcgcgatctcggctcactgcaagctccgcctcccgggttcacaccattctgctgcctcagcctcccgagtagctgggactacaggtgcacgccaccacgcccggctaattttttgtatttttagtagagacggggtttcaccgtgttagccaggatggtctcggtctcctgacctcgtgatccaccggcctcggcctcccaaagtgctgggattacaggcgtgagccactgtgcctggtgccctacctttcttaatgtggacatcttgcataactacaggacatattcaacaccaggaaacagacactggtacacaccaccaggcatattcagatttcgttagatcgacatgcacgtgtgtgtgtgtggttctatgcagtttagcacctgtagctttgtgtaaccggttccctacctcagtcaagatacagaactataccatcatcacaaagctaccccttatagccatactcctgaaactaatctgttctccatctctgtaattttgtgggctcaaggatgtcatataaagggaatcacatcatatgtgatcttttgagattgcttttttccccctcagtacagtcccatcgaggtccattcaggctggtgcattgattgacattgtatttgagcaaaagataccgagaaaacaaaataactgctgaaattggggaaacaagaccataattatttgctatttattcagttattttggaactttcgtttgtttttacacaaatgacatatctgcagaggagagttgtatctaacttagtgaatgcatgtctttatgcattgctgttgacatgccaacactagaatattgttggagagacacagcactgctgaaaatgttgtcaggctctgagaattgactgcaaaacaatcaggactgcaaggaaagggaagaagtgataagtccttttgagaccggtcagtttgccaggaaaacaacttcaggcaggaaatgaccatttttatttctctacatgtggtgctggtgtggtgcagatgcttggaggcgttttctttaacccccccaggtcctcacatgaaggggaaacagatggagagatgttattagcaagatggcaaaaatgaatttccatggtcttgaagaaagtgatacagttttgctgcaggtttcacgataaattagaaaaattatcagtgctctgctcattgtggttggcataaaacttggtcccttccatttcttgtttttttttttttttttttgaggcagagtctccctctgtcacccaggctggagtgcagcggtgtgatctcggctcactgcaacctctgcctcctgggtccaagtgattcttgtgcctcagcctcctgagtagctggggctccgccaccaccacgcccggctaattttttgtattttttagtagagacagggtttcactgtattagccaggatgatctcgatctcctgacctcgtgagccaccacgcccggccaggttcaagtgattcttgtgcctcagtctcccgagtagctgggattacaggtgtctgccaccacgcctagctaatttttgtggagacgtggtttcaccaagttggtcaggctggtctcgaactcttggcctcaagtgatccacctgcctcggcctcccaaagtgctgggattacaggcgtgagcccctgtgcctggccatttctgttaactttcttgaaattagataccctttgaattgtgtttcagtgggactaaagttaaattttatttgttcatgcaattccagttatggagtcataaattagatatggagaaactgaacactaaattttaaactctgcttaaacttcagtataaaaattaaacataaagttatactgattttcgtgcagacgagtgaagatcagcatcagaattggtcagtctgcttttgcatttcttaaataaccttcacagttaaaagctcattttgtccttttgactgtacattcctaaaaagtgctgactcttagaaaagaatgctctccttgcatgtcttcttttgcatgcttctgcataatgtgtgttccttagaaaccagtttaggaaatgtgtcatggtggctatggagagaaggaaggaagtccttgctcgggttgaatttttcttgccaaggttggtggtcactgcttctgggacaccctggttctcttcacagtgttttccgtctggctcctctgaaggtcaggatcactttcttttatgacaagttgaagtgtcctggtggtgaacatattttgtgccagatacttactattacttctctttcctcttaaaatgaactgttacttttggtaacaatctgtgtcaagattttgtagtagaagagttcctggaaaggctgtcagtgaaggattaaatggcatttccttggctcttaaaaaaatcaaatacgccgggcgctgcggttcacgcctgtaatcccagcacttcgggagtccgagccaggtggatcacctgaggtcgggagttcgagaccagcctgaccaacatggaaaaacatgtctctactaaaaatacaaaattagccaggtgtggtggcacgtgtctgtaatcccaggtacttgggaggctgaggcaggagaatcacttgaatttgggaggcggaggttgcagtaagccaagattgcgccactgcactatagccagggcgacaaagtaagactccgtctcaaaaacaaacaaacaaaaaaccccagaaatgaacagtttttaccaggccacatgatgtcccagacttagattataaaaccacatttgctgattctggcagcatgttccttcttcagaaccttcctgactttagcttgaaagctgagctggttgaaacgtcttgaaaagcagtatgtgcagttttgtcacgagagaatttccgggtgggtgggataggttgaggtgggtgttcccgtgtagaagtgggggctgaagctgtgtggtaagatgagctctgtgcttgggacagggttgtaagggtctggccaagacgcatagaagaaatagcatgtgagtaggaagcagccctattttaaatagcgccctggagacttgaattgggaagaggaccaagaagagtgtgaggcagtgagatgcccagcaccagggtgggagaggcgagttccagtgactcgtgggcactcaggagcggggatgaccccagagacacagggagcttggaaccatgcttctgtattcagacatgactttctgccagctttgcacgctttttcctgaaacattgttggcagaggggaacttgtatcttctgttcagttgattctcgattttaaacgtttgttgccttttggagcctgcacttccccttacctggtgattggagtgtgggaatggttgggggtatcaaggcttcagcaggctgggaaggtggcaggagcacagggtgccaggggtgggctgaggggctggtgggtgctccgggattttaggaggagtgctgtgcccacagctgctgtgtgtccctgaggccagggaagtcctgactcccatgctaggttctttctgccccatgtagctccctcagcgcccccaccccgatacctcaggaaactccaggtcgaaactccaggtcgagtggcagacctcctgctgggtgcgttcttaggaataacacttctagccgggggtttgggtcagatcctgattctactctcctttgtttcccacttttaaattttttatatttatatttaaaatttagagacagggtctcactatgttgcccaggatggtcttgaactccttggctcaagtgatcctcccccatcagcctcccagagtgctgggatttataggtgtgagccactgcgcccagccctttcccaccttttcaaattgtagccctgtcgagagcctggagtcttcatctttgcctgaaattcagactccgagttgtgatggttttgtgttcatctctgtgcttggcttcaggatactccccatttacctttcttctcacccaccctaagctttggtgtctgtctacgggtttgcttagaagtgtagagaccaacagccaacatggggtgcctggcttttgtttttgcgttgtggggtgtttttcttacctttaaaatccctctgatggcagcacaagggtgtaatgaggattagttatttagcatatctaaagaactttgagctccttagggcaggcggcactgtattaggatttatgttttgctttttctgtggaccgcctttgtgtttcatgtaatgtagctgaaatagcaagtacgtgtttcttttcttttcttttttttttttggagatggagtctcattctctcacccaggctggagtgcagtggcgcaatcttggttaaccgcagcctctgtctcctgggttcaagcgattctcctgcctcagcctccggagtagctgggattacaggagcgcaccaccatgcccggctaatttttgtatttttggtagagatggggtttcaccatttttttttttttgagactgagtcttcctctgttgccaggctagagtgcagtggtgcgatctctgctcactgcaacctctgcctcccaggttcaagtgattctcctgcctcagcctcccgagcagcttggactacagatgcgcgcaccaccatgcccggctaatttttgtattttttttagtagagacggactttcaccatgttgaccagaatggtcttgatctcttgaccttgtgatccgctagcctcggcctcccaaaatgctgggattacaggtgtgagccaccgcgcccagctggggtttcaccattttggccaggctattctcaaactcctgacctcaagcaatccacccacctcggcctctcaaagtgctgggattacaggcatgagccactgtgcctgggcggttttgaatttttagtagagacagagtttcgccgtgttggccaggctggtcttgaactcctgacctcaagtgatgcgcctgccttgggcccccaaagtgttgagattacaagtgtgagccactgtgcccggccagttttttttttttttttttttttgagatagagtctcgctgtgttgcccaggctagagtgcagtggtgtgatctcggcttactgcaaccttcgcctcccgggttcaaacaattctctgtctcagcgtcctgagtagctgggattgcaggcacctggctaattttttgtatttttagtagagacggagtttcaccatcttggccaggctggtcttgaactcccgacctcgtgatccacccgccttggcctcccaaagtgctgggaattacaggcgtgagccactgcgcccggcctattcctttttttttttttttcccccaggcggagtcttgctctgtctcccaggttggagtgcaatggcactatctcggctcactgcaagctctgcctcctgggttcatgccattcttctgcctcagcctcccgagtagctgggactacaggcgcccaccaccacgcctgcctaattttttttttttttatttttagtagagatggggtttcaccgtgttagccaggatggtctctatctcctgacctcgtgatctgcctgcctcggcctcccaaagtgctaggattacaggcgtgaaccactgcgcctggcctttttttttttttttttttttttaaagatatagggtcttgctgtcgcccaggctggagtgcagtggtgtgatcacagctcactgcagcttcgacctcctggactcaagcagtcctcccatctcagcctcttgagtagctgggcctacaggacatgccaccacacctggctaattttttaaataaataaataaattagttatttattgacagggtctcattcgcattgcccaggctggagtgcaatgttgcaatcatagcttacttcagccttgacttcctgggctcaggtgatcctcttgcctcagcttcttgagtggctgggaccacagccacacctggctaatttttaaaaaacttttttgtagaaatggggtcttgctttgtagcccaggctgataacgaactcctaggcttgagtgatccacctgcttcagcctcccaaagtgctagaattacaggtgtgagccaccacgcctggcctggtttattattagatgcttgacgttgtgaatttcaccttcttagagcagaatatttttgtgtttcttttaatattcttgagcttggttctgggaggaggctaagtaccttgggaacagtgtgattcctacaaggcagcaccaccgcagcctgtagtctggggctagttttacctcactcgaggcagtgtcttctctgaatgcttcttgaggccgttgtttgatgtggtttttcctccggctgctgggcctgtgctgcggcaggggctcttctctcctctttcctgagactcttccctctgctccagggagtttcctttatttctatttaatgtatttatatttgtttatttattgagatggagtctctgtcgcccaggctggagtgcagtggcgcgatctcagctcactgcaacctctgcctctgggttcaagtgattctcctgcctcagcctctgaagtagctgggattacaggcgcccgccactatgcctgcctaatttttggatcttgagtagagacggggtttcactatattggccaggctggtctcgaactcccgaccttaggtgatccgcccgcttcggcctcccaaagtgctgggattacaggtgtgcgccaccgtgcccagcctattgttatttaccactgaccacagcgcaacaccattgtccgtctccagaaagaggccttcagtgccgtgagcgcatgtcagatctctgccatcttctcaaagcacactttgaacagtatcttttaaaagttcacttttggggccaggcaaggtggttcatgcctgtaattccagcactttgggaggctgaggtgggaggatctcttgagcctaggaggttgaggctgcagcgagccacgtttgcgccattgcgcagcctgggcgacaggatgagaccctgtctcaaaacaccaccaccaaattcacattagcctacagttgggcaaaaccatctaacacaaaccctatgtataaaaaaggattgaatatctcatgtaatttattgaatactgtatgaaagtggaaaacaaggtgattgggcacttgatgtacgatttctactgagtgcgtgttgctttcatgccattgtaaagtcaaaaaatcgttcagcttcaccatcacaaattggagactgtctatacttatttacagataaggaaactgtggcgtggagaggttgtcagttagcctaagtcccggagctcccgagaggtggagctggagcttgaactgtgtcggtttgcccctgagatgcctgcctgccacctttctgcctctgattgcctggagcaccaggcagccaggttatgcttctgcctggagggagcagtctcatttaaaaacaagaaacaaaacgcatgcttattggtttgtctttcctgtgacttctctgtgcccctttgcatttgatgagtcactggggtgttgctttatgatggtgacagaccctctgttggggcctctcacctgggtcgcctgtgtgccggctggtgccgcacgaaggccagcctttccttacagatgctgccttggctacaccgaccctccctgtggcttctcccatcgcctgaagtccccaccaaacccctatacgatactgaggttttaaagcttttgaaattatgtttatcccgttaaccccttgtagtttattttcttgtgagatgggtctccatcattcctcgcatcgattaccaaatatgttctagaacatttatgaggtaatgcttttttctccttgcaatgcatcgtcaactgtattctcaaatgtttgtatgtttttttttttttttgagacagagtctcactctgtcccccaggctggagtgcagtggcgcgatcttggctcactgcaagctctgcctcccgggttcacgccattctcctgcctcagcctctcgagtagctgggactacaggtgcccgccaccacgcctggctaatttttggtatttttagtagagacggggtttcaccgtgttaaccaggatggtctccatctcctgacctcgtcatctgcccgccttggcctcctgaaatgctgggattacaggcatgagccgctgtgcccggcccaaatgtttgtatgtttttacagactccttctgtgctttctagtctgttctatgaaaatgttgatatgtttatttttagttattaggaagtaactgggcaggtcttcctaatagcgtttattcttgtgactttcttgtctaggcttgtccttacttaaatgttttaaaagattaaaaaagttaaagaatgtagtttaaggccaggtgcggtggctcacgcctgtaatcctagcactttgggaggccgaggcgggtggatcacgaggtcaggagtttgagaccagcctggccaatatgaaaccctgtctctactaaaaatataaaaaaattccctgagtgtggtgctgggcacctgtaatcccagctacttgggaggctgaggcagcagaatcactcgaacccgggaggtggaggttgcagtgagccgagatcgcaccattgcactccagcctggtgacagcaagactctgtctcaaaaaaaaaaaaaaaaaaaggtttaagaagttaattataaaacattgcccctgccttgcccacatttctaaacctgagtgaattattttcattttatagctgtttcttcttaaaaatttactttaagaatgattgctttttaagtctaaattgtgtgttcctactatttatgggtgttctttcccccatttagtcattacttattgactttttttgagacggggtttcgctctgttgcccaggctggagtacagtggtgggatctcggctcactgcaacctctgcctctcaggttcaagtgattctcctgcctcagcctcccgagtagctgggcttacaggagcctgccacactcccggctaattttttgtatttttattagagacggagtttcaccatgttgaccaggctggttttgaacccctgacctcaactgatctgccctcctcggcctcccaaagtgctgggattacaggcgtgagccaccgtgcctggcctgtttattgatgccttactctagaagatgagtcttttaactcttgctcaagtttctcttctcctgtacttgtatatgtgtaatattttacctgattaatgtctatttcatgtctgaaagtactgttctcagccgagaataacagttcaacttttgggtcagtttttaatttttttgaaagttaatgattgccttttgttttgcttacttttttttttttttttttttttgagacagagtttcactctgtcacccaggctgtagtgcagtggcgcgatctcggctcactgtaacctcttctgccgggttcaagcgattctcctgcctcagcctccagagtagctggaactacaggtgtgtgccacctgtctggttaatttttgtgttttttgtagagacggggtttcgccatgttggccaggctggtcttgaactcctgaccttaagtgatccacccgccttggcctcccaaagtgctgggattacagccgtgagccactgcgccggcccgtgtctgaaattttaagacgatgtgcccaagtgtggcatttggtggccttattcaatctggaaacttatgtcttttgggctctagtggaaaatattcttgttgtattttgttgctaacctcttctgtttcatttcactttctcttttctctgtatttctctatggtagttgaaattatacctcctggtgtagattttcctgcctttctgcctttcgcgttctgtttccacgactctcaagtttgtcctctagcccttgttttgcatttttaatttctgctgtcagttttatagcttgagagctttctcatgacccaagtgccccttttttggtggcatctgtttctttaagctgtattttatctcgtctgtgtaaaggtgtttcctttggcgtttccttctgtgcattgtctcattgctttgaatgccttttgtgtaggtttgtttggtctctggcccatgctgtgaggttctgagctctcactttgtgcttggtggctggtggctgtccacccatgtgtaccagtgcctgccaacctgaagggctttggcaggggccttcgctgcagggtgaggtctgaggaggagcctgaatgctggttcagttcttccagaggactctcgactctcttctcttgcttggtgagcaggtgggtgttgtgagcccggctgccatcattctgggatggggcatctcacccctcggggagtctgtcactgcgctgtgctgctctcacgaggccccttgctccacactccgtggagctcggagcttttgtgttctcacttttccagcttgtctttttctgagatgggggccgaggggcctgcctggctgcagggtctcatggcagggatctgctgctctctgtatagacttgaagcccatcctcctgacatcggtctcctgaggttcctttcattcccaagccttttcgggttctctgttcgagacggtttgcttcttaatttgtcttccctcctgcaggtagctggggtgcagcttgctctccttggctgagtcagttactgcttgaccattgcttggcaatgtccaggattgtgataactctattgtccttgatgactgattgtttctacacacatgccccggcccccatttatgacttctgatatattcttgatttatcactgcctgagagaaggctttggggaggaataatttgactttatgtaatttttattttttttagagatggggtcttactatgttgcccaggctggtcctgaactcctggcctcaagtgattctcttgtctcagcctcccaaagtgctggggttacaggcatgagccactgtggctggctgctttcttattcttttttttttttgagatggagtctcactctgttgcccaggctggagtgcagtggcgtgatctcggctcactgcaatctctgactcccaggttcaagcgattctcccacctcagcctcccaagtagctgggactacaggcatgcaccaccacgcccggctaatttttgtatttttagtagacatggggttttgccatgtggctaggctggtgttgaactcctgatctcaagtgatctggtggccttggcctcccaaagtggtgggattacaagcatgaaccaccatgcccggcctctcatgcttaaatgaagtagtaatacctgaccttttattttttatctatttatatttgagatggagtctcgctctgtcacccaggctggagtgcagtagcgtgatcttggctcactgcaacctccgcctcccaggttcactccattctcctgcctcagcctcctgagtagctgggactacaggcgcccaccaccatgcccggctaattttttgtatttttagtagagaggggggtttcaccctgttagccaggatggtctcgatctcctgacctcgtgatctgcccgcctcggcttcccaaagtgctgggattacaggcgtgagccaccgcgcttagcaatacctgaccttttagtaaatcaaatttgggcaggtggttctgagagcttgtgtggcatgtatttctcagtggaattttaaatagaatggtgactcggcatttattccttgtctgaagtaagcaagtaggaaggaccttgttccccattcaagggaatgaacggtgtggtatgtactttgcaaacctacgtatgggattagtctgtagtgctctgaaacctagaaatcaaaggaaaggcatggggcctttgaccgactgacctttgtttcttgctggtaatagaatatagtaaatggaaatttatctcagtagtttagtcagtagattctgttattggtaatgatgggtgagtccaggggagtttggatacttgaattttccagagagatttgtttaaaccctgaactgaaatgttttttctcatgtattttttgatgactttaaaaaataatttcagcctttattttagattctgggggtaaatgtgcaggtttgttatgtgggcatattgtgtgacaccaaggcagtttatcatggtggatgataaaaggggactcccttaggtcgagtgttgctgaaagacctctctgcggaagtgacatttcatctgggtcctgaagctgcctgggaccagccttgtcccagcctggaggggagaagggcttgaggtggtagagagccagttgtgtttcaggacctgagaggctgtactgttggaactcagtgagcgaggagaggagctggcataagccggattgctgggggaggccagaacgtgctgggccttgaaggctccggcatgagtctgattttatcctgggtgccttgtaggaagctgccaaaggaaagcgagtgagtaacaggtctgatgtaattatatgacaatattacactgtagcaggacaagccacagacaaaacccctcagacaccgagttaaagaagggctttattcggccgggagctttggcaagagtcaaatcttcaacagccgagctccccgaatgagcaattcctgtccctcttcagggctcacaactctaagagggtccacgtgagagggtcgtgatcgattgagcaagcagggggtatgtgactgggggctgcatgcacctgtaattagaacggaacaggatgggacagggattttcacagtgcttttctatacaatgtctggaatctatagataacataactgattaggtcaggggtcgatctttaactacgaggcccagggtgtggcaccgggctgtctgcttgtggatttcatttctgccttttagtttttgcttcttctttctttggaggcagaaattgggaataagacaatgtgaggggtggtctcctcccttaatgccagcttctctgtggaaagtaggttggaggtgagtggaaggtgaaagctgcgaagagtcccaactggagatgcaggtggcagcggagatggcgagaataggagagtccgaccggagatgcaggtggcagcggagatggcgagaataggagagtcccgaccggagatgcaggtggcagcggagatggcaagagtaagagagtcccgaccggagacgcaggtggcagcggagatggcgagaataggagagtccgaccggagatgcaggtggcagcggagatggcaagagtaagagagtcccaactggagatgcaggtggcagcggagatggcgagagtaagagagtcccgaccggagacgcaggtggcagcggagatggcgagaataggagagtccgaccggagatgcaggtggcagtggagatggcgagagtaagagagtcccgaccggagatgcaggtggcagtggagatggcgcgagtaagggagtctgactggagatgcaggtggcagcggagatggccggaatagagcactcgtttggaggaaaagcggacaggtcgacaggatggatgtgatgggggccccgaaggagaggatgctgtagagactgacatggcacctctggtgatcccgtcgctcaggaaatgctcgttgttttccagctgtgttgctcagaagctcttgggacagtttttggtgcattatgagcactcagagatgtggtgctattgctgggtacctgctgtctgcagagcatttattcttaccaagtatttattgagagcctgctacaatgccaggcacttcccaggattctgggactatggcagggaaaaaacaactccgtgttcacatggagcttgcattctagtggacagagatcaaaaagaaaaacatagtttagtgggatgttagaagatgataaacacaacagagaaatatcattctagtggatagagatcgaaaataaacacgaaatttggtgagatgttagaagatgataaacacaacagagagatattaaggggggaaggtgattgggtaaatgagggtataggtgttcaattttaagtagaatgatcagggccggcccttctgtgaaggcagcagttgagcaaggacctggagctagtgaggcagtggccacgtagaagttagtggggagggcgtcttggcagagggagtggtaagtgcagaggcctttgtcggggaggatgactgctgcacggaagaaacagcaggaggcgcatgtggctttaggacagcaatcctgggtggaaaggcagtagggggttaggttggggggaatgaaggtgggggacaggtggagtagggcctttcctagagctttataaagactgtggctcttactagaatgctaaacactgagtatccttgagtagctcaggcctttgtaatgcagagtggtgaatggtgtgaggggtgaacagcttcggagaggtcaggcatggaatgcaggggtgatgcttggctcaggtcttgctaggctgatgggatgtgggggatggtctggaaagggtgggcagtcccgtgtgccacgctgcagagaggcatgagcagcagcaggacacatgtgatacattgagggtgactcctagcgtgggtagggcctagtggggcacgggaatgtggctggagaccaaggtgggagaggcagccaaaaccagatggtaggacctcctgtctaggatgtgggctgtttaagtattttaagcaggggaatgacactcaatttttaaaaatttttttgagatggaatctctctcgtcacccaggctggagtgcagtggtatgatctcagctcactgcaacctccacctcctgggttcaagcgattctcctgcctcagcctctcgagtagctgggattatgagtgctgccaccacgcctggctaatttttgtatttttagtagagatggggtttcaccacattgggcaggctggtcttgaatgcctgacctcaggtgatccgcccgcctcggcctctcaaagtgctgggattacaggcatgagctaatgcatccagcctcactttctgttttgctggtagaatagtcattttgaggccaggcatggtggctgaggtctgtaatcccagcactttgggaggccaaaactggaggatctcttgagttcaggagttcaagaccagtgtgggcaacttagtgagaccttatctctacaaaaaataagaacagaaaaggaaaagaatggtcattttggatatagaggatgggttttaggtgaggcttagaggcaggaaagccagttaggaaaagatggattgctttggtccagaggagacggcgaggatctggagtggaaaggtaggagtgacatgtggaggtttagaaaacagaatcaacagaggcatgcatgctaaacattcttcattcgtgacagctttgagtctgcatcagaaatgccacttagccggaatggtggagtgaggcctctgtaatccaatcctccataaaagcagtgaaaacactggcaaaaatggtcaaaatcaactgtcagaacgcgaaattaaccaacggttgcgacactctgaggagcttttatctgtgaacaactgtggcacctctaactcaacctcctcccattctcttctccccagctccgtggtaaccatggaaaccagctgccttataaccatggtagctgggaaagccagcagcctagcagctactggaggggacacatgaaggctggagctcctcagcaagtcccggctgcagagcatgtcactctcggacctgtcccacttactgagcttgccatcgtatgagctagctcagtgtgaaaaccctgtttctgaaagagagactgtcagttgagaattctgtgtccagtaaaactgtcctttgaaaatagaggaattggctgggtgtggtggctcatgcctgtaatcccagcactttgggaggccaaggtgggtggatcatctgaggtcgggagttcgagaccagtctggccaacatggtgaaaccccgtctctactaaaaatacaaaaattagccaggcgtgttggcgaacgcctgtaatttagctactcaggaggctgagtcacgagaattgcttgaacctgggaggcggaggttgcagtgagccaagattgtgccactgcactccagcctgggtgaacagagcaagatcctgtctcaaaaaaaaagaaattaagatatttccaggtaaacaataaacagaggacatttgttgttttagccaacctcccttataatacatactgaaaggaatgtctcaggctggaatgaaaggacactaggtggtaggatacgtgaagaaataaaagaacaacggtgaagacagctacatatgtcaagttaaaagacaatgtaagtgcacttttgtaacttttagtctcctgtctttttttcttttctttttttttttttttttgagacggagtctccctctgtcgccaaggctagagtgcggtggcgccgatctcggctcactgcagcccccacctcccggactcaggtgattctcctgccttagccttttgagtagctgggattacagactcccgccaccaggcccagctaatttttgtatttttagtagagacagggttttgccatgttggtcaggctggtctcgaactcctgacctcaggtaatccacctgccttggcttcccaaagagctgagattgcaggcgtgagccattacgcttggcccctatctgccttaaaagacaactgtacaaagtaataattataaagctgttttgataggcttataacatataaaggtgtgatttgacagttacagcacaaaagagaagtgagggaagagctttataggagcaacatttctccgtaccattagaattaggtttgtgttaatcaaaactggattgttttaagttaaggtgctagttggctgggcgcggtggctcacacctctaatcccagcgctttgggaggccgaggtgggcggatcacttgaggttgggagttcgagaccagcctggtcaacatggcaaaaccccatctctactaaaaatacaaaaattagttgggcatggtggcgtacttggagacaggccagatgtagtggctcacgccgcctgtaatcccagcgcttttgggagaccaaggtgggagggtttcttaaagccaggagttcgagagcctgggcaacaaaagtgagacccccgtctctacaaaaaaaaattagccaggcccagagatgtgcccttatagtcccagttacttgggagactgagacaggaggattgtttagcctgggagtttgaggtgcaatgaactatgatcacgcccctgcacttcagcctgggtgacaaagcaagacattgtctcttaaaaaaacttggagataaatgcaaataaaaacacagcattccaaaaattatacactgcagtgagagcagggctgagggggaagtttataactgtaaatacctacattaaaaaagatctcaaatcattaacctgtgtttcaccttaagacaccagaaaaagcacgaacaaaacctaaaacaagaaggaagaaaatagcaaagatgagagcaaagattggttatttgaaaagatcatcaaaattggcaaacttagtgagactgactgagataaaaagaagactcagattgctaaaagcaggaatgagaggggagattattattcaccttacagaaataaaaaggattataagagaattccatgaataattgtgtaacaaaatattagataacttagttgaaatggacaaattcctagaaagtcgtgaccgaagctaactcaagaagaaatagaaaatctgaatagttgctcactttggcaacacatatactaaaattggaacaatacagagattagcatggcccttgtgtgagaatgacacacaaatttgtgaagcattccataaaagaaaacctaaatagacttataataagtaaatagattgaattaataatttaaaaacttgtcacggccgggtgcagtggctcatgcctgtaatcccagcactttgggagtctgaggcactcggatcacttgaggtcaggagttctagaccagtctggccaatttggtgaaaccccgtctctacaaaaaatataaaaattacccaagtgtggtggtgcacactggtaatcccagctacttgggaggctgaggcaggagaatctcttgaacccaggaggtagaggttgcagtgagccaagatcgcaccattgcattcaaacctgggcaacgagcgaaactccatctcaaaggaaaacccaaaaactgaaaaacaagatcttgtcacaagaataagctctgggccaggtggcttctctagaaaagtcacacttactgagcttgtcattatttgagttctaccaaacacttaaagaattaataccagtcctggccgggtgcagtggctcatgcctgtaatcccagcactttgggaggctgaggtgggtgatcatttgaggtcaggagttcaagaccagcctggccaacatctctactaaaaatgcaaaaattggatgagtgtggtggcacgcacctttagtcccagccacttgggaggctgaggcaggagaatcgcttgaaaccgagaggcggaggttgcagtgagccgagatcatgtcactgcactccagcctgggcgacagagagagactctgtctcaagaaaagaattaataccagtcctttacaaactctttggaaaagtaggagggcatacttaactcattctataaggccagtattatgctgataccaaaactagacaaagacatgacaagaaaggaaaattacaggccattatcatgaatatagaaacaagaatcttcaaccaaatgctagccagttgaatccagcaacaacgtataaaaaggattatacaggccgggagtggtggctcacacctgtaatcccagcactttcggaggccgaggcgggtggatcacgaagtcaggagatggagaccagcctggccaacatggtgaaaccccatctctactaaaaatacaaaaattagctgggtgtggtggcatgtgcctatagtcccagctactcaggaggctgaggcaggagaagtgctagaacccgggaggcggtgttggcagtgagccgagatcacgccactgcactccagcctgggtgacagagagagactctgtctcaaaaaagaaaaaaaaaaaaacaggtttatacaccagattcgagtgagaattgtcccaggaatgcaaggttggcttaacatctgaaaatcaatccatgtaatacttcatattaataccataaaggatgaaaaaatgcctggtcatctccatagatgcaaaaaagaacaggattggaggattcacatgctgattccaaaacttaatacacaaatgattaagatagtataatactggtataaggacagatacgtagatactgagataataatattgagagtacagaagtaaacctttacatttgtggtgaattgattttcagcaggagtgccaagataattcaatggtgggggaaaagaatagtcttaaacaaatggtgctgggatgactgaatctccatgtaaaagtatgtaaatggactcctaccttacactatgcacaagaaataactccatggatcataaacccaactgtaagagctaaaactatgagactcctaccaaaaaaacaggagtaagtttctgtgactttggaatatggttttttttttttttttttgacagagtttcgctctgtcaccaggctggagtgcagtggcgtgatcttgtttcactgcaatctccacctcccaggttcaagagattcttctgcctcagcctcctgagtagctggggccacaggcctgcaccaccatgcccagctaatttttgtgtttttttgtagagatagggttttgccgtgttggccaaacgccattcgcttgcctcggcttcccaaagtgctgggattacaggtgtgagccactgtgcccggtctggaatatgatttcctaggtgacaacaaatgtgcaaatgacaaaaaaaaagttaatctggacttcataacgtgtgctacaaaatactatttagaaggtgaaatggcaacctgagaatgagagaaaatatttgaaaaccgtgtacctgataaagggctcgttatttagaatatataaaaaacttcatgaagacaactaaattaaaaaattgatgaagtgttaggggctgcgggtgtggtggccatacctgtaatcccagcattttgggaggctgaggtaggtggatcacccgaggtcaggagttcaagaccagcctagccaacatggtgaaaccccgtctgtactaaaatacaaaaattaactgggtgtggtggtgtgcacctgtaatcccagcttcttgggaggctgaggcacaagaatcacttgaacctgggaagcggatgttgcagtgagccgaggtcatgtcactgtactccagcctgggtgacagagtgagactgcatctcaaaaaaaaaaaaaattgatgaagtattaaaatatatatttcttccaaatagatttacgaatgttcaataagcatataaaagctatcagaaaaatgcatatcaaaatcacaatgagatactgcatcacacttacccagatggctgtaataaaaaagatgaggccaggcactcccagctgtaattccagcactttgggaggccgaggtgggtggatcacctgaggtcaggagtttgagaccagcctgaccaatatggtgaaaccccacctctactaaaaatacaaaaattagctgggcgtagtggcaggcgcctgtaattccagctacttgggaggctgaggcaggagaattgcttgaacctgggaggtggaggttgcagtgagccgagatcgtgccaccacactccagcctgggtgacagggcgagactccgtctcaaaaaaaaaaaaagaacgtgtgagtttatccctggtgatgggcacagtagcttctcgtggctggaccagtgctttgctccttatttcacacttctcatcacagctctttcattgatggcacacccatttgaagaagagaaaccgaggcaggttgcggttaagttgatagcccagggtcacgtagctagtaaaacatggagtgacattccagtccaggcctgatttcagagtttgcttggctgactgctgtgctaaccaccttaatagtaattttagcaattatagcttccttcaaaaattcttgggcttggtcaattttgggcttttgggttactcggcggaatcactttatttctttgagacagagtctcaccttgttgcctaggctggagtacagcgatgtctgtcctggctcactggagtgttgacttcctgggctcaggtgattccccccacctcagcctccctagtagctgggaccacaggcatgcaccaccacacctaattttttaaaaaattatttatggagaccaggtctccctatgttgcctaggctggtctcgagctcctggactcaaaacagccctcccacttcagcctcccaaggtgctgggattataggcgtgagccactgcccagtctgaaatcactttatatacagactaaaactctgtagaccaagttttgctgcacattgcaaggacagaagattttggtactttggtattttataatcatctgtcataggctcctttactattttttgtggaacttgggctgttcccagaatactaatcctctctgttgattagttcagcctgtaaacaagaaatcattaaccagcatgctgttcctgaagaatgaccagggacaataattgtaaaaattcaagagcttttatccaagcctgcccctatagagtgtgttctttgctacttcatggaatgcaaattgtaacttgcttttgccagtagctatggcatgtccaggttactcattagccaccagagctcctaagttcactgcgagaattccctgatgcaagtacagtacccttagtgctgatgggctggctgcatttcagacaggaatagtgcaggatgactgtggccagcgtctctttaacaaagatcagactgtgtgtggggctgggcttgttgctgtgggtcagttactctttaacaaagatcagactctgtgtggctgggcttgttgctgtgggtcagttactcttgctcatgctttaccctttcagaattcagctcctccccgcttctcctcaagctaatttatctaaaaagataagatttttttgctagatctgttcccggcacggtggggtggttgaagtcctcctgtgaggccctctgccttatggagatcagtgcagtgtcagtggcacgaattggtgcctggccaggagcacgctctgctcctttacaggagagcccctgacaggcactggagggctcagattgttacctgcgtccgtcatgactgcaggggtgctgcgttgatcatgcagcttctactagagcgtttttggtaaatttgggacatggtagttgacttgaatgtgtcagtcttgcctgcaggtcatcatccgtcatctcagccatggtcgtgctggattgtctttcttgtttttgagacagcctctctctctgtcacccagtcgcccagtctggagtgcagtggtgtgatctcggctcactgcaacctctgcctctcgggttcaggcaattcttccacttcagcttccccagtagctgggattacaggcgcacgccaccatgcccagctaatttttgtgtttttactagagacaggatttcaccatgttgcccaggctggtctcaaactcctgacttcaagtgatccacctgcctcagtctcccaaagtgctgggattataggcgtgagccactgcgcctagcctgaatgcgtatttttatgtgaaattagttttcctgaactgtcagaggaggcatggtctgggtggcttttctaccgtaagagccccccccccccattgtcttcacacagtggcctgcctggcagctgcagttggaagtccctggctccgtcctggctccgtctgcctccgtctgcctccgtctgcctgctgtccctgcacctcccctttttcctgcttttgcgtcgtctctgctcagtaggggcgctgggccaggtcactccatccctggttcttgcatcatgctcagccctctgtggatactggggctgcttaggctctcctgtcctcaggtctggccgagacgtgacactactcttctctctaccttctctctttttttttttttttgagatggagtcttgctctgttgcccaggctgtagtgcaatggcgcgatctcggctcactgcaacctccgcctcctgggttcaagcgattcttctgcctcaacttcctgagtagctgggattgcaggcgcctgccaccatgcctggctaatttttgtatttttagtagagacgaggtttcaccatgctggccaggctggtcttgaactcctgacctcaggtgatccgcccgcctcagcctcccaaagtgcagacgtgagtcactgtgcctggcctctctaccttctcttgcacagacatgatgccgtgaggttgtacggccgttggtggctttccttttgagggagctggagctcagaggcacagcagaatgagtcaaaggctgcacttggattcccacctcacttggattcccacctcacgtgctggccccaaagttcactcttgtcatcaccttccatgcttctccccctcctcaggggctggcctgccctcgttttaaagtgtgtgtgtatgcgtatatttgtatttatgcatgtgtgtgtacatgtgtgtatttgtgtgtgtgtatgtatttgtgtttatgtgtatgtatgtatatgtgtatatatgttgtatttgtgtttatatttgtgtatatatgttgtatttgtgtttgtgtacgtgtgtatttctgtgtatctgtgtatttgtatttatgtgtgtttgtaaatgtgtgtatatgtatatttgtgtgtggcgtgtacatttgtgtatttgtgtgtatttggtttatgtgtgcttgtacgtgtatttgtgtgtatatatgtgtatttgtgtttgtataaatgtgtattcatgtgtgtttgtaaatgtgtgcatgtgtgtatttggtgtgtgtgtgtgtgtatttgtgtgtgtgtgtgttgaaaattgggcaattaaaagcaagctgtggatgggaagctggaacttgtctctgtttctgtcccacagaggaggggggttaactgcctgtttctcctggtggttacctctataactctacattatgtgctgtttgttttagtttgtggtttcacaaccttatataaaatctgtagattccgtttaggaaagttgatttagctcatgtagtagtatttcctctttctcctgcccccaggtttttagtatttctgctttagatctgagctctgttgattctggacaacataagttccccctcagagtggtttctttccctggtgtttgggtgggtaaagtagagggcacaaaccagggagagagcgcaaggtcccctgttgcagacttaatagcacagatctgtgtacacctttgtgagaagcacacatgtacacacacagtggcatgcacacataggcacacgcacactggcacaccgcacccagtgcagagtgcctcacccatgcgcagtcccagctgtgtgaagctgcctgcaggctttgtgtggcagaagctcccaagacactgttttcgtgactctttcagccaagtccaaaaaacctgccatcctggggggcatcaggctgccagcatcctcctgtacctgctgtcctgctttcttgtggagccgtccgctggtcagccatcatacagagaggagtggggatgctgagacgctgggcagcctgcccaggggtcactgctgtgagcagctttcagggctgggaagagagactgactgggacaggaggtttgggtgtgtctgtgttttgttaaaggtcccctgagggcagaagctgttgtgttcccagcacctgggacagtgcttgggtcggggagccgccacataggcacttgattttcctgttctgaccacctgtccatctgaagttttctagggtaggactggctcaaaggagtgtttgttcggttcaggaaacattcaaccttatttattagcaaatgtgtagtaaaagacaaaagatattctggaggagggagcttgtcctgtgggggaggcaagatcagttttggaagcagcagtggtggagttcggccctgtgactgcgtagggcaggggtgagctctttgtcctctgatctgtgcacaccaggcctggcggggccgcttgtgtcgtgttctgatgtggatgggttgctgcagaggccttttacttcagctggagatccttaaaccaaagactcacttgagaaggttttttaaatagtcagctttattattgctttaaaaaagtgacttagggccaggtgcagtggctcacacctgtaatcccagcactttaggaggccaaggtgagaggattgcttgagctcaggagatcgagaccagcccaaataccgtagtgagaacttgtctctattttttcttttttctttttttttctttctggggatggaatcttgctctgtcatctcgcctcactgcagcctctgcctcctgggttcaagtgattcgtctgtctcagcctcccaagtagctgggattacaggcatgcgccaccacgcctggctaatttttgtatttttagtagagacggggtttcgccacgttggctaggctggtctccaactcctgacctcaggcgacccacctgcctctgatgaggcaccaccatgcctggccatatttttaattttttaaaaaatagaataaaaagtgacttaaatgtacacaaagttgtttttgcacacaactcaccttaccctgtgtgatgaataattgtattttgacagtgcttgttaaacatgtgtatccctattaaaatcacttgtactctttaagcctcagttttcacagctggtccaggtagagttaaactacacgtggtctcatctctctcccttgcctggcttgtgacatacatgcaagtgtttgttgagcgaggtccctttagcaatagatttagcgtgtactgaaagtttgattgtcacacatctaatgtgcgttttccctcttttgtacaatggagaattcccacatttcatgggtgtgagctgaaaaaaagacttgaagctaacattcctctgctgtcccactacaacacagaagacttctgtgaccccagaatatgtgggggtttctccccatcggcaaacaagctatcagttctgcagcaggcaccagcggggtgtcctccagcttgattctgacaccgtctacctggaggtagtgtcagatcctgcaggggagtcccagggctaccccctacttctcatgttagcctcaagcctcaggttgtgacctgtgcttgtgcatgacagactgtgaatggacatctcacgaccccctctttggattcaattagtttgctagagaggctcacagaactcagggaaacacatttatttgatcataaaagctagtatgaagggtgcaggtgacgtgatgcgtagggcatggtaccgggccatggccgctccatgtccctccagggatccccatgtgttcagttatctggacgttccccaaaccctgtcctcctgggccttttgtgcagacttcattggataggcatgattgacagctgtgtacaaatgggactggaccaaaagggtgtgatctaaacccagcagggcctgtctgtgcagattcttcccggcctatctgtgcggcgttccttcccccggggtgtggggcagggccccttcagaaatgtgggtcttgtgacccacagtcagacaaggtaggtcagagaatttatggccagctccacgacagaaaggctgggggtggttagagtcccttgttagtcttatggcctgccttggggaaaaaataacaagagctgtgagagttttgagccaggaactgtagatgaaaaccagtatgtatgtataatatcacaattggatattatgcaagtggacttgtcagattttgtaggaaagccctcatgttcctaccaacaactgtttgccctgcagcacagacctgctccctgtatcgtaatccctcctagcttcatctgctttccttacacagcacatggtgattaaataggtgtgcgactgcttggtcagtaacagtcttctgccagactgtgtcttccgtgagggtaacagagaccatgtctgtttttgctcatccttgtgccttggtgcccagcaccatgtgtggacagttgtaggtgctcagtggatatttacggaacaaatgcatcagtccgtctttaaggttccctctagctgtggaccgagttgcctccgtggctccaccccagttcatatgctgaagccccaaccccagtgtgactggatttggagacagggctttcaggaggcatttaaggttaaatgaagtcatagaggtggggtcctaatcctgtaggattggtggccttgtaagaggaagagagagcgtgctcgcttcataagcatgcgtcaaagaaaggccacgtgagcacacagaaggtggctgtctgcaagccaggaagagagccctcaccagaaaccaccctgctggtgtgttgctcacaggcttccagcctgcaggcctgtgagaagatgaagtgtttcagccgccccgtctggggtgttttgtcatggcagccggagcagactaagggacctgtagccctgacattccatcattttatgaccatgaggaattacagatcctgggcattgctttcaaatgagacacatgaaattgaaatgtgtcagttcaggtattttgattgccattggggatggataagccaaaaagaaagactattttaaatgactagatttgacaacagataggttgtaatgtctatcaacagatagactgaatagatcagtctttcctgctttggacagaagctagcctttggggctgttggtgggagcactcctaatattattaatgatattagtacctaaccatatttgctgaggacttctcttgtaggagtgctaatcccatcatgagggcccacctcatgaccccatctaaacccagccaccttccaaaggttccatcttcagatactatgacattggggttagggcttcagcatgcgaattttgaggggacagaaacattcagtccatacggcaggggaggcaggctgatttcaacgggcacatctgagctgagtcttgaaggatgcgtgttgcagaggctgcatctgttttgcgactgcagttgatcgaggaagaaactgtggaggtgaatttataaaagaaaattgaaagcctatagtagtaaaactgtgtgcttttggcagtggaagttgattttaggagtaaacctccgtgttattagcggatgacgatttatcatggcaaacatccagcaagatatttgagttctgagcttggtaaagaggtagagttagaaatggtgctgtggagcaccccctgggtgcgcagcggctggcccgggcggttcaggactcgctcctttgctgtcctgacccaggcactccctttcccctaggctcagtcccggccccggccctgctgcagccccttcctgccggctctgggttggaggcaggtgtctgcttcggcttttctcctgccttgaaacggggcctcatcccattcgtgagttctgagtgtcagtcttatcagggaaatggtgtttctttagaaatcaattaaaataaaaatggctttttgttcttttttttaggtaaaagtaaagaagcagaaataaaaaggataaacaaggaactggcaaatatcagatcaaaatttaaaggtaagtatgtttaaccttttccatgaaatgtcctgttgtaaattttctgtagtaagaacccagtcttttaatactgtcttcttttctcccacactaaagtgaagttctcagtttgtacagtttctatcagggccctgtcagaattaggaaatggcatgtgtggagctggttaggtggggcagcccctcctggtgtctggtcttttcctggagctggaacagcactggtctagtgcccagctgcatgtcgcagtattagccaccaggccagcgtgctgggggttcagaggacagacaccaagtacgggaagtgctctgtgtaaggcgccaccgaacgcctcctgctgacggtcaacagggacctgacctgcgctcggtggactgcctctctgtgagccagtgtgtgggctgagtgccttccctgaacatccttactttgaagaattgtgaagtacggatttagttttcagcccttgggacatttttgaaaccccagttaatccttaaagccttaatttttcagttaatgtttacagatttgcaacctggctcacctccctgagcataccttagccacggtgtagctgaaattgcccaggcacaatgagtcggggagagggctgagcctgacccctgtggaactggagggacaggcagaacacagcttggggacaactggagtttcatgggatgggtgcttttgagggcttgagaatggatatccagtagtttcttttcttttctttttttttttttgagatggagtcttgctctgtcgctcagtgtggagtgcagtggcacgatcttggctcaccgcaacctccgccttccaggttcaagcggttctcctgcctcagcctcccgagtagctgggattacaggcgtgtgccaccacatgcctgtaattttatttagtagagacgagatttctccatgttggccaggctggtctcaaactcctggcctcaagtgatctgcccgcctcggcctcccaaagtgctgggattacaggcatgagccactgtgcccggcccagctgatttttgtacttttagtagagacggggtttctccatgttggtcaggccggtctcgaactcccgacctcaagtgatccacctgcctcagcctcccaacatgctgggattacaggcgtgagccactgtgcctggcctggctgatttttgtacttctagtagagatggggtttctccatgttggtcaggctggtcttgagctcccgacctcaagtgatccacctgcctcagcctcccaacatgctgggattacaggcgtgagccactgcaccccacacggctggtttttgtatttttagtagagacgggggtttctccatgttggtcaggctggtctcgaactcccaacctcaggtgatccacctgctttggcctcccagagtgctggaattacaggcgtgagcctctgcgcccggtgtgcacctttgttcttaactgtagaatggggaaaccagtgatctcaagttgggttctccaggatgtggactctgaaatgggctgtgtacagaagatttattcagagtgacaccagtgaaaagtaaagggcagaagcagatggagatgtgggtctgacagtcaccaccaccagtgaaaagtaaagggcagaagcagatggagatgtgggtctgacagccgccgccaccagtgaaaagtaaagggcagaagcagatggagatgtgggtctgacagtcaccaccaccagtgaaaagtaaagggcagaagcagatgatgtgggtctgacagtcgccgccaccagtgaaaagtaaagggcagaagcagatggagatgtgggtctgacagagtcgccaccaccagtgaaaagtaaagggcagaagcagatggagatgtgggtctgacagtcgccaccactagtgaaaagtaaagggcagaagcagatggagatgtgggtctgacagagtcgccaccaccagtgaaaagtaaatggcagaagcagatggagatgtgggtctgacagtcgccaccaccagtgaaaagtaaagggcagaagcagatggagatgtgggtctgacagagttgccaccagtgaaaagtaaagggcagaagcagatggagatgtgggtctgacagagttgccaccagtgaaaagtaaagggcggaagcagatggagatgtgggtctgacagtcgccgccaccagtgaaaagtaaagggcggaagcagatggagatgtgggtctgatagtcgccgccaccagtgaaaagtaaagggcggaagcagatggagatgtgggtctgacagagtcgccgccacgagtgaaaagtaaagggcggaagcagatggagatgtgggtctgacagagtcgccgccaccagtgaaaagtaaagggcggaagcagatggagatgtgggtctgacagagtcgccgccaccagtgaaaagtaaagggcagaagcagatggagatgtgggtctgacagtcgccaccactagtgaaaagtaaagggcggaagcagatggagatgtgggtctgacagtcgccgccacctgcccatcagggagctcgggagcccagattgccggctggaggtggtggcactgggttgaaagggctgcgccctggcaccctcttgctcagccgtggctctcaacctgggggagccggaccatgacaaagccagccttactcttggtgtcactgggccttcactgaatgggatctgcgtctgctgtgctcattgtgaggaaatgaggaaatgcatagaaattgcttgaaaggaaaccagcacccagccagtgtgaatccattttgttattgtgaaaagagttcatggccttcagaatggtgaagatgaaattcgaatgggaggtttttataggtttcagaagaatcatctaatgtgttgaggtgtaacttcaaagactttgctaggctgttaaatttacaaactctctggccaggcgtggtggctcacgcctgtaacccagcactgtgggaggctgaggcgggcggatcgattgaggtcgggagttcgagaccagcctggccaacatggtgaaaccccatctttactaaaaatagaaaaattagctgggtgtggaggcgcgtgcctatagtcccagctacttgggaggctgagtcaggagaatcgcttgaactgggaaggcggaggttgcagtgagccgagatctcgccattgcactccagcctgggagacacagcaagactctgtctcaaaaaaaaaaaaattttgttttataaattctgtataaatgttttgggactaaaggagacttcatgcctgtctggctgtcctagatagggaaggtggcccctcctacacagtgatctgttggcttttgttgagcacgcgcgtaccctgggtggtggcagcagacatagaagaaaatctactccttgtccgtaagaaatgtgctgcctgaggcctgccctgccagctgtgggtagatgagatgacttagagctgtgctgtccaatttagaaatagagtatcagtcacattcataggtctaaaggctctggcagcctcattgaaaaaaagtaaaaaggagcaaatgaaattaataatatattttatttagttcagtatatctaaaatttcgttgtaatcaattgaaaaaaaaactggctggcacgatggctcatgcctgtaattccagccctttgggaggccgaggtggctggatcagttgaggtcaggagtttgagaccagcctgaccaacatggtgaaaccccgtgtctattaaagatacaagaattagctgggcatggtggcgggcacctgtaatcccagctactcgggaggctgaggcaggagaatcgcttgaacctaggaggcagaggttgctgtgagccgagatcgtgccagtgcactacagcctgggcgacagagtgagactctgtctcagaaaaaaaaactaaaaaaaaaacaaggtaccgagttattttataccaggtctttgaagtctggtgtgtgtgtcacacttaagagtgagtctcactttgtactggctgtttcacttgctcactgaccgcatgtggcatgaggctgctgtgtgagcactgctgatttagagcaacccttctgttgaaaacagttgatcaattgattgatctattgatttactgagacaagatcttgctctgttgaccaggctgcccagtgcaatcacagctcaccgcagcctcaaccccccgggctcaagccatccttccaccttggcctcccaagtaactgggaccacaggcgcgcaccaccacgcctggctaacatttaaaaaaagttttgtagagatggggtcttgccatgttacctaggctggtttcaaacttatgggctcaagagatcggtctgccttgacctcccaaagtgctgggattataggcatgagccactgcacctggcccctaggagtgtgggtccactcgtgggtggaggtgggaggctgttaaacaaccgaagtgcatagagtggcccccacaacagaggcgtcagccaggatgtcagtggtgccagggctgaggagccttgtctagagggatgatagtcaaagactggagacccccttccactgtgaactgaaggcctcaccagagggaatacccgtagggcagagtgaactgtcagtgagccagtcctcttccagacttgccgctgggtgtcttgacatgggggtgctctacacaacctcaaaatgttgggaaggttacaaccagggaaagaatcgatatccaacaaaaatacctttcaacaatgaagctaccctgtttgagtggggcatcacgaaccatcctgcttcaagggagcctgtgggtctgactgcagcttcagctctgacctggagttctggggcttctctgcggggcaccagtctgtaggctccattttagataataaaaattggcatattctggggtgggcaggatctggggttcacctgcagatgaacagggcagaaaaagcttgatggggtgttaggggaatctggttggcctcaaagggaattaatttggggccctgttcctgaattggtaggcagcctgcatgtaaggctgaagtcggtttggccagagcatgggctggagtgctaccaccctgctacatggtcaatgccacagtctcacttttcctatttttttttaataaaatgttgtgaacaacaacaacaacaacaacaaaaatgaagctaaaaaatacctgccgaagacagaaatggaaagaatttcctaccagaaggcctgtgttaaaggaaatgccaaaggaaataatcccagatggaagcgtggaaatggaaagcatggaacgggcaggaaattaaaggaaataatcccagatggaagcgtggagatggaaagcatggaacgggcgggaaattaaaggaaataatcccagatggaagcgtggaggtggaaagcatggaacgggcgggaaattaaaggaaataatcccagatggaagcgtggaggtggaaagcatggaacgggcgggaaattaaaggaaataatcccagatggaagcgtggaggtggaaagcatggaacgggcgggaaattaaaggaaataatcccagatggaagcgtggaggtggaaagcatggaacgggcgggaaattaaaggaaataatcccagatggaagcgtggaggtggaaagcatggaacgggcgggaaattaaaggaaataatcccagatggaagcgtggaggtggaaagcatggaacgggcgggaaattaaaggaaataatcccagatggaagcgtggaggtggaaagaatggaatgggcaggacagcgggagatgtgtaggtaacgccagtgtgttgtgtctcgtggttatgtctgtctgtggagtttcttcagtagtgcagtgaacttcagagagttgaaaccgtatttgtttgccatcaagaagactgtaggcccaaatggcttccctgtgatctttatcctttaatgagggttgttaggtgtgaccatctgatgtgtggcctaaggtgtgtggagaaaagtgttcatgtcagtcccaactttggctttaagggagtctcccctctgggctcttcctacctctgctatggtaaggatgtgctttgggtggtgtgggcctggagcagagccatgcacagcaggcccgtccagatctgacggtgtcttgacggtggccccggctgacctgcagacgcatgggcaagaaatcagtgcttatgtgcacctgccatgctagtgggagcccaggggagttactgggatgttcacaggtgtgccttccatctttaagcctttagaaaacaactgttgtgttctcatactctacagagacatggtagtttctttcttttttaaagagacagggtcttgttctgttgcccaggctggagtgctgtggcatgatcctaactcactgcagccttgacttcctgggctcaggtcatcctcctgcttccacctcccgagtggctagggctacaggtgtgcaccaccacgcccagcaaattgtaaaacttgtagagatggggtctcgctgtgtttcctaggctgatcacaaattcatggcctcaggtgaactcacccacctcaagtgaatcctcccaaaagtgctgggattacaggcgtaagccactgcacctgactgggaatttcttatgactgatcatctccaggagttttccaggttgtgcacattaatttgctaaataggccaggcgcggtggctcgtgcctataatcctagcactttgggaggccgaggcaggcagatcacttaagctcaggagttcaagaccatcctgggcaacgtggtgaaaccctaaaaatctctactaaaagtacaaaaaattagccgtgtgtggttgcacatgcctgtggtcccagccacttgggaggctgaggtgggaggatcacttgagcctaggaggttgaggctgcagtgagctgtggtcatgccactgcactccagtctgggtggcagagggagaccttgtctccagacaaaacactttactttttctttcacttgggcagcctgtttttcattttaccgtgagtttgcttgattattaattcattgatgtaaaaggcaaagactgagcaactgccttgtgccacacactgttgttggggctggtgtgcattggtgaggaagtggaaggagttcccaccctgcccccgagggtgtgagcctcatgcaggctgtgtgggttggagagtgtagagccagcagtgcctctggctggtgaccagatggctggtggccagtcagggcactgtcccttttcccaactttcaggtcaagagaaggcgtggaggctctggttcctgactcactctccagtttatcttattctacttgatattttgttataaaaaaataccaggccaggcgtggtggctcacgcctgtaatcccagcactttaggaggccgaggagggcagatcacgaggtcaggagtttgagaccagcctggccaacatggtgaaaccccatctctactaaaaataaaaaaattggctgggtgtggtggcgtgtgcctgtaatcccagctactcgggaggcagaggcacgagaatcgcttgaacctgggaggtggaggttgcagtgagccaagattgcaccactgcactccagcctgggcagcagagcaagactgtctgggaaaaacaaaacaaaaataaccaagcaggtttcagtcattatgaggtagacattttgtcacattttatcgtctgtgaagtctgtgtgcatctgatgagtcagtgaaagatggtgctcatgaacctgtgttgtgaccttacgttgcctcagacacctgatgctccgtccgtgctgtgctgtttcgttttatttttttattttattttatttttttgagatggagtctcgctctgtcacccaggctggagtgcagtggcgcgatctcggctcactgcaacctctgcctcccgggttcatgccattctccttcctcagcctcccgagtagctgggactacaggcgcccgccaccacgcccggcttatttttgtatttttagtagagacaggatttcaccgtgttagtcaggatggtctctatctcctgacctcatgatcctcctgcctcagcctcccaaagtgctgggattacaggcgtgagccaccatgcgcggccctgtttcatttttatagtaacctgctgagaaagttgggctcagagaggttaaggaatacgtctgagaccacaagacaagcaagtggctgcatctttcagactggagcccaaacttaatcgtgatccttttatggtttaggatgaggttttccagccatctctcctctgatctgcacaaaccaaggagacagatattactgttatcctctgccttttatagctcagaatattaaagttcaactcaacattttgaaattactagaataaaaaagtaattctagcctagtactgaaaccagcattttgaagactgtatcagtctgggtcctttcaggagggataaacttcacagtggcacctgccaggggagctggcgggctcacctgccacctgccccaccgagatgggtgagggtgtggagcgagcattgctgcttgtttcctgtggccctgggttaggccaggaatccacgtgctgccacatgagcagcgggccgagcactgtggctttctcctcgcgctggcgacttccgctgcccctcacggtgcttatgcaacaggggtggtgtgcccaggggagtgctctgtgacatctctgggaggcccagaggtgatcctgcatcaccctcactgaccagtgggctcagcttctaaaggtgggcctaagtttcccagcacccgggagctctagagcagctcttcgtctggggtcccgcgggagcagaggctggtcggctcctctcggagagagcctgtctccgtctccgcccctgttcccatccccgtctccatccccgtccccatccctgtcccacaaaactcagcccagtcgggccgctggtcctctcccctgtcagttattttttcctttgagaggtgctttgagtaacagggaagtctccggagggaggaggaggtcaagcagtatttttggctgtggttgtccaaggcggcttccagcgggtgatggaatctgggctgggtaggagacacggtgctggggcttcccagtggaggatctctgctgcgcagcccgtgctcagctgtgtgtgccctcctgcacaaacagggcacggagaacgtgtctgctgggaccccttgggcacagcaagcagataagtgggtcggggccgggggagggaggaaccaggtcgggtctgcttttatttatatcatctggtcttttaaattatgttaatttgccgctgacaaggaggggggtttctcatgagctcctcagagtgcagcatgcagctgactggccgactggtgatgcaccgttccccaggaaatgtggccggtctgtattctacacagttgaggtcgtccgtggaggtgtgagcgccccagcccttcacaagaagggggccagagcggctgtcgcagctgggctgtcttcccagcctgcgttccttcacgctgtggcagcagagtctctgtgagactcggcctgcacaaggccacctttctcgctcgcctccacagcctgctggaggctggctctgagggacactccctcacctctcaggtgggatagaaactcctggcaatgtagaacagccctttttttttttttttttttttttttttgagatggagttttgctcttgttgcccaggctggagtgcaatggtgtggtcttggctcaccgcaacctccgcctcccaggttcaagcaattctctgcctcagcctcccgagtagctgggattacaggcatgcaccaccacgcctggctaattttgtatttttactagagatggtgtttctccatgttgaggctggtctcgaactcctgacctcaggtgatccacctgcctcggcctcccaaagttctgggattacaggcgtgagccaccgtgccgggcccagaatggccctttttttaagggttggttttatattttggaattttatattctgccaattacatgttttgaacctgccctgccatgatcccttgtgaggggctcagacaaactgcgatgaggcagagaaacagaagccctaggggccgtcgcgtgtgggccttgttttcatgaccagctgatttgccctagaatggctatgaagtggcagataatttagactgtgttcatatgcctaaattaaactgatttcaaagacaagcttgatggttgaaggcagggtttgcaagttccatcacagcagggccctctgtgggattttggctggtcggagtgaggccctgtgagggccagctgggctgcacctgcccagggttgtcgtgggagggtagaactcttgttgccagatgttctggtgcctgtttttaaaagggaaataaaaaacttggactctcatgagtaccatgagtttagaaaggttattcatgctcagcagcgtctgcactgcacctgcctgggcccggccacccctctcctggaggcttgtccgtgctgcctgctgtactgctgcactgccctctgctctcccctctcccctgcctctgcccgcctggaataaaacctcttccccaccttttctgtaggtgacaaggctcttgatggctatagtaaaaaaaagtacgtctgcaagttgctcttcatctttctccttggtcatgacattgactttggacacatggaggctgtgaacctgctgagttcaaacagatacacggaaaagcagatcgtgagtatcgctgcaggtggagacggcagaggatggcgtgggcctggcaggactgaggcccggtgcccgtgtagggccgctgcttccttctctgcccacagctgacgtgagccacgtgggtctgctgcagatggagacgcgtgcccagtccttgttagcacctgctgccaacaccctgcgggcccccttcccgcccaagctgggtgttcttcaggaagccctgatgccctcacagggttcctcctcctgcatgcggttttcctgatgaggtggccatgccttttcctcctttctttgcaacctcccttacggcgagtttcaggactgcccggttggtctggagagtgccgcacgcggcccagcgtttgatgtggttggtgctctgtgcccatgaggtcggcctccagaggaggggaggatgtctccctgacacagtgccttgttgacgcactgtcccaagtagacccgtcccgtggtcccttggacagctttgtttctgcagtaggcgctggaggcacatggctgggtcttggtgcggagggtgctcaccccaccatctccccagcccttgccgggctggtgcacagtgtcctgtcactctacttttgaagtcttcttgggctctgcacgttgagctgtgtagtctcttgcagtcacattatttctatgttttccctggtggtataaagtaatattttcttccatttgtcaaaaaatttaacttagagaaattaagagagactgtagatgtcttggggttttgataagtattggtgtttattcaagcatttgtggagtgcctgtggtgtgttggggggatgggggattagccttgaggacggaggcacagggactggaacttgggcctgcccttgtcctgggggagatgggtgtcacatggctccacagacatagaagttgaaaggatttgagagagggagtggaggtgggtgtgttgagctgaggctggagggaggggaagttaactgggggctgagggtgggaggagcagggagagcagagcaggtggtgcctggcagtggcctgggcgtgcgagcgcagggctgaaagggcagtggtgtttggcagggcgggagctccctcgtggcgtcttcctgggagccgtgggaggctgggtacatctttaaccggggtgctcagtgatgggcctggagaaaaccactgtttccctccaggtggggagggtgtcaccttcgaggatggctgggaagaagtggcagtgacacaggactggggtttgccctgggtcagtgggggtggaggggggcggcatgaggctgtgacacaggcagattaaagagtgggagggaacaggcagccgggtttctggaaattgttgtagctaaaatcagcctctcagtgaaggttcctgcccatcttaacttgaggatagtgtgatgtccggaacactcagacgcgtggcccacagtgaagtgagtgggaccggggggtccagttcctgttggcatctggctcgtggcacgctagtcaggtgtgccccacaggaacgctgcgccatgagagcatcgtagcagaggcatcctcggttccactggaacagacgtttgccgaatcctgagaggcgccgctcccacagcagtgccctgggtgcgtgggtggtgcctgggctgcttccgcatctgtgtgtcactgattgttgggtgactcagggccacaggtggacttggattgtcatgagctttctcttctcctgtcttttggaacgcagggctaccttttcatctctgtgttggtgaactcaaacagtgagctgatccgcctgatcaacaacgccatcaagaatgacctggccagccgcaaccccaccttcatgggcctggccctgcactgcatcgccagcgtgggcagccgggagatggccgaggccttcgccggggagatccctaaggtcctcgtagccgggtatgtgccgggctcgtgccgggctcctgctgaagatgtgctgctttcatgccaaatacatcaaatatggagctgcttagcctaggaaatgttttactctccccatcttatgggagatgagatgtagcctaaggtgggatccagaattacaagtttaggccgggcacggtggctcacgcctctaatcccaggaccgtaggaggccaaggtgggagaatcgcttgagcccaggagttcaagaccagcctgggcaacatagggagatcccatctctacaaacagttttaaaaaattagccagttgtggtggcgtgctcctgtcgtcccagctacttggtaggctgaggcaggaggattgcttgagcccaggaagtcaaggctgcagtgagccgtgttcatgccttggagactccagcctgggcgacagagcgagaccctgtctccaaagcaaaaagagaattacaagtttagatttcaattaaagtgcaatctaataccactgagattcaaaacacagatcaaagaagaacgcccacaccctgccagcaaaaccaagaaggggcttcagccccgcagggcactgggtagaacgatgcatctctgggcagctcctcctcgtgcccgttccccagggcttcacgcggagaagccgagcaccgcgccggagcgccctcggccatccgttccgtcccttgttaatttggagagaagcctcgaggggctgagtcaccagctctggaagagcttaaagcaaccctggggtgtctgtgccacaggcagggcccccacctgtgtgttccaggataccctgcggagttgggaaactgacccctcgcccacacggtgccacccggctgagctaggcctcaggccacgggagagtgggtggacatccacccagaccacacagtgaggactggagacaaggtggtgggaaggcatgagagaaacaggcctagaccggcgtctcaactgggccacattggctttgtgagggtactgggccgtgtcttggggcatttttggttgtcacagtgggtagagaccagggtgctgcaccccacaccactcaggatgctccacaacagagaatgaggcagccttctatcagctgtgaggtgaggacgtcccacaatagagaatgaggcagcctcctgtcagctgtgaggcaaggaggagcccggctggcagagagaccgcagcataaccacgagaagacagatattcagaagcgcaagagctcagagatgggtgaccccacagtaggatggacaggagcagaaccaccgagccgggggagcaggcgcagtgcctgaaggcactgttgctcctcaggccattcagtcataggtggcagagcatgtgggcgccccgaaaacagggtgcccaagatggaaggaaggctcgaatgatcacagggcgctggtgcaggagagggagggtggggctgggggtcgaaaccagccagcaggtccagtggattctgcctcagggccacggcctcctggccctccctctcctcctgcccccagggttgttgcttgcctgtttattacctgtttccacccttggggtggaagcttcctgggctctgaggtttctgtccactgtggtggccgctttacaaacctagcatcttgaacagtaccaggtccctagtaggtgcttggtggatgtctgcgcgtgagcggaatgcaagacagggccacccctgaggcacgtgcagattgatgaagtggggcactacctgaaccgaggacctgctgcaggagccagggacagaggagggaggagccagggtgaggaggggtctccaggggccagtgcagtgcatctgcggctggaagggagcaggtggccagtgcacagcatctgcagccagaagggagcaggtggcccgtgttctggtgcctgagtggtcccatgaagggagtgggtggcccgtgttctggtgcctgagtggtcccatgaagggagtgggtggcccgtgttctggtgcctgagtggtcccatggggatgaaggtcacaggcagggttctcctacctcagagagctcaggtaacatggtacccatgggccttccttgaagaaaagggctagttgttgaaatccagctaagtagtagatgactcaaagtaatatgctaaggctgggcacagtggctcacgcatgtaatcccagcacttggaaggccaaggtgggcgggcctgaggtcaggagtttgagaccagcccggccaacatggcgaaaccccgtctctactaaaaatacaaaaattagctgggtgtggtggtgctcacctgtagtcccagctactcagaaggcttgaggcaggagaatcgcttgaacccaggaggcggaggctgcagtaagttggagattgcaccactacacaccagcctgggcaacagaataagactctgtctcaaaaaaaaaaaaaaaaaaagaaagctgggcatggtggctcatgcctgtaatcccagtactttgggaggctgagacgggcagatcatgagttcaagagctcgagaccatcctggccaacatggtgaaaccccgtctctactaaaaccagaaaaattagctgggcatggtggcgccctcctgtagtcccagttactcaggaggctgaggcaggagaatcgcttgaacccgggaggcggaggttgcagtgagccgagattgctccactgtactccagcctggcgaaagagcgagactctgtctcaaaaacaaaaacaaaaacatgctcgggaaggaggtgctgtcattggaggactgctggtgtgtgtgtcacctagaaatggaaggacagagtaggtgctgaggaggtcaggtcattcctagggccagaggtagggacgggaggcagcggccaaggcagaagagtggggtggtgtctctgctgggatggacggagttggtggaaagagaacccgtggaggtgcagagtagccgtggggtcctcggtctccctcgtgtgagccgacattagcgagtagctgtagggtcctcggtatccctcgtgtgagccgacatcggagagtagcagtggggtcctcggtctccctcgtgtgagctgacgtcggagagtagtggtggggtcctcggtctccctcttacgagccgacattagtgagtagcagtggggtcctcggtctcccttgtgtgagccgacgtcggagagtagcggtggggtcctcggtctccctcgtgtgagccgacatcggagagtagtggtggggtcctcggtctccctcttacgagccgacattagtgagtagcagtggggtcctcggtctccctcgtgtgagccgacgtcggagagtagcggtggggtcctcggtctccctcgtgtgagccgacgtcggagagtagcggtggggtcctcggtctccctcgtgtgagccgacctcggagagtagcggtggggtcctcggtctccctcgtgtgagccgacgtcggcgagtagctgtgggatccttggtctccctcgtgtgagccgacgtcggagagtggcggtggggtcctctgtctcccttgtgtgagcagatgctggaaagtaatggtggggtcctcggtctccctcgtgtgagctgacaccggagagtagtggtggggcccccgtccccttggtgtgagctgatgatttagactgtgttcttctgcctaaaagaggaggcggatcctcctcctctctgaggagtgtggcatgctgggcgccctcgtgtgtcggcatttgtagccacaagcatggaacctggttggctcttctatgttgaaggactgctgggggcccagtcatggggtcctgaagccgcctggcaaggacagccctgctggcgcctggaacacacccctgacgtggcctcgaccacacatccacatggacgcatggcagggtgtgtgtgcggttgctgctctgggctgatctggtgaggatggggtgggccggaagagggacacaatacctactcctccttgcaggggcgttggcacccagaaggggaattttttattcaaagtaattttttggaatagtatagggggagatttaggaataaaaaagccaaaaggtaaatggtacaggtagtccctatacccttttctgccttccatgtggggcagcagattccagctgattctgttaagcgcttggagaagagactggccctttttcagctgtgcctccacagcgtccaccccagggtccctgttgccttcccagctgcttagcagaatctggtggcaggagggcgaagggggataagcggagcatggaacacgtctgtgccctggacaagcatgttggcagcagagcaggagagccatggccggctcccttcccaccgtgtctgtagggacccgaagccctttgctccaggggcaagggcatgtgtggcccagcccactgttcagggtggggcgtggtggggtgagggtgggcgtggggcaggggaagatcatcaagcagatgtggagctccatggcggtgcagggccctccaagcatttctgttgtgattgtggattattaagttgtaacaacaacaacaagaaagctattgttcaaacaacaaatgagcaatgtgagctgcatgtggtcggctggtggttttggtggtgagaaggttggcagggagacctttggagcagggcccatgtatgctgagaacactgctgctgccccctaggcggcctcggcaggcggccctgagtgctgtcttggcccctgcgccagccccacccccgcgtctcctgctggctctgggggggtgctccgtgcagctctgcgctgtcttcagcctgttgcgagtgactcttgacgtctgtctttcagagacactatggacagcgtgaagcagagcgcggccctgtgcttgctgcgcctgtacaggacgtcccccgatcttgtccccatgggcgactggacatcccgagtggtgcacctgctcaatgaccagcacttggtaagcacccttggctttggttctccccgctcccccaggtgacctttgggatggccgttgtgaagacaccatggtgcgccttctcgggatgcccaggagaggctgtcacaggggctgctgtggctgcgtgctgaggccacgggggcccttcctggggctggatgagtaagactccgcctctgctcatcctgtggccaggcattggctgaagccctcgggtagcacagaggctctgcagacacccccagctgagacacgtgtctcctggaaacacctatctagtatgcggagctcctgcctggtgtcccggctgcctgtgccctcatctaggctctaacgtgcagtcttactaatcctcgtgcctactccacgggccaggcccccatggtataggcatacaccaagggtggaggtttccagcgatttggtgatgtgtgttcaggtgctgtgagaggcacgtgtgggggaggggctgtgctagtgtgtgagcctcaggggcttgagggtcacagagccgtccaccgcatccagcaggggtggatgtgggcagaatgtgcttgtcctgcctgaactctgctctatgaatgagagggtgagagttggcaggagtggaagtatttcctgctgcgtggagaggcatgtgggccggtcacgcgttcacaaggatccaggatagagggccgagaatgccactttcccatgttgccgtgagccccatcctggcgggggagcctttcagacggtgctgctggaggctgtcgtccaccatcccgtggaccgtgggaggtcatgggattttcccgctttgcagtcaaggaggccgaagctgggaaagaggaaatgccctctgacagccccaggcctgtacccagagttggcgtgttggggtcttgggcgtcagagagtgtgcgggtgaagcagctatgtgggagctgtgagtcggcagggcctggtcagggaggcaggccccgggctcctgctgcacatggcagccggtcactgggctgctgagggaccggggctgcctgctttcccctgggccttctgcagacaggatctgtgcacgctctgtgggactggccgggactgctgtcattgctcctgccttggcaggaagtttccatggccatgcagccgcagggtcaccctgagtgcttttcagggtggcagggccttgcctcagatggccacaagggcacctctccttggatactttatgattctgtgacgccagctacttggtttgctttttgtatttttatgcatctggctttatttcaccaggcacttgagtcagcatattcttggttataggcaacggaaactcatcctgaagggacgccacagccaaccccagggtgggctccctgctgcccagtactttccctccttagctctcccagcttgcgcacctgcacccctggcagctgtcttttgtgtggccatggcttttgtcaaatgccttccacctctgacagcgaaggcctgaggcttggcttctctggtctcaagtcaggagcccccaagaaaggtgtcatttgctcacctagagtgagtgagctcccccatgtgtccttcagggaggtcttgtggagtgggacaggaagcgtgggcgggaccaggtgggtgagggtcagaaggtcggcggtcaggcctgcgcccggagttgggtggtggggagggaggtgatttggcccgagtgctgcatgggcaccgtgccgagccttgggtctgtagcctgagggtggcctgatggagcagacaggttggagtggacaaggacaggagacaccatggggagaagggttggggggctgggccaagggctggaggccactgaggagacacggaggtcgctttggcaccagctgccaccacaggggtggggccacgtgtcgcgggcctgagtgtgcccctcgagaggcctcttacagtctcagtgcagggggaggacgtcctaaatgagaggctgagctccgcgcctgtcagcctgttgcagggggcattctagatgcgtgtttcctgggggaacacaccgtgaacattcaggagccccgtggggaatgactctgccctcatggaagttacagacctgcagtttcttacaagttctttattggacatggcaaaatccgttagcactttgctcaccgagaaatacaggaagaagaccaatcagaccaatttctttcttacagctttcacattttccttggaaagctgagggcacaggcacagcaggtctctggggagagtgccgtgctatagtaggtgcaccccagcctggctgaggagccgtggcacagggcgagtggtggggggattgcatcagtcattcaagtagacatttcctttcagacagaggcttgctctgtcacccaggctggagtgcagtggcgcgatctcagctcactgcaacctctgcctcctgggttcaggcgattgtcctgcctcagcttcccgagtagctgggattacaggcgaggcgagtgccaccacgcctggataatatttgtatttttagtagagatggggtttcaccgtgttggccaggctggtcttgagctcctgacctcaggggatccgcctgcttcggcctcccaaagtgctgggattacagcataagccaccgtgcccacgcaagtagacacttcctgagctcactgtttacatcttcagagtgaataggtatcatttattttatattttttaaaaaaatttatgggagaatgtctttatataattaaagtcttttttcaagaggtctgagtgactgattccctagtggctgtcctggagcggtgacaggctgcccggtgccgtgtcctggagcggtgacaggctgcccggtgccgtgtcctggagcggtgacaggctgcccggtgccgtgtcctggagcggtgacaggctgcccggtgccgtgtcctggagcggtgacaggctgcccggtgccgtgtcctggagcggtgacaggctgcccggtgccgtgtcctggagcggtgacaggctgcccggtgccgtgtcctggagcggtgacaggctgcccggtgccgtgtcctggagcggtgacaggctgcccggtgccgtgtcctggagcggtgacaggctgcccggtgccgtgtcctggagcggtgacaggctgcccggtgccgtgtcctggagcggtgacagggtgcccggtgccgtgtcctggagcggtgacaggctgcccggtgccgtgtcctggagcggtgacagggtgcccggtgccgtgtcctggagcggtgacagggtgcccggtgccgtgtcctggagcggtgacaggctgcccggtgccgtgtcctggagcggtgacaggctgcccggtgctttggggaggactgcttgtgccctgggatctgaatctgttctcactgagggccaggaggagcggggagggaggactcgcgtgctgggcctagtggcctcatccagcctatggtggttgagtgactgccagggccactttccaaaaaggagaatggaaaaggacttctccagttgctcttttctatagtctcacttctgggttgtaaagattcagatcagtgtaaaggtagcgtctccctctacagtgaacatgcgttattaaaccagaggcagcaagtgcagatgacggtggaggccaggccaggagagggcagcaggcaaggtggcgtgtgcagcccacatgcttgacctgcatggctggacgtggccctctggctcttcgatgctggcagggatctgggctaagcatgacggaacttcccagtttttaaggagaagctggaaaaagaaaatctgcatgtgccatctgggagaacattgtaggtttctcggagtaggcctgaggccgaggtggctgtgggctgccactgtgctgctggttggtttaaggttttctttggaagatgagtgaacacaagtggttagcttcaagtgttctgactcttgtgtgtgtgttttctttcagggtgtggtaactgcagccacaagtctgatcaccactttagcacagaagaacccagaagagtttaaaacctccgtgtctctggctgtctctaggctaagcagagtaagtctgttcgtgggggagcagaagtcagggtgggttttgtcttagttatttatttattagcttatttgtagaatgcaaggtatttgatcagtttataaattcagggatgaaaaccaacttggcttctctgtcagccttcttgttgagaactgtcctgtctgtacagaagcacagctccctgttcccatggtgtgagtgagcacccaacaccatgtgggtggaggaggggcacccagtggccccgtgtcccccactggggaagcgtggctggtgcttcgtggacccaccatctggcgtgcacgctaaagcctgccattcagcttcctgttctgagtttgatgcagatggacctgcagcacacattcttttgttttgctcaacatggtaaaatttttgttttgtgtgcagctgttatacattcatgtttgatgcttcatagaattggttgtgtgaattgtccgctgcagtttacctgctgtcctgttgaacacttagctccttgccctctgaggctgctgtgaatcctccagcatgagcagtcttggatgtcccttggtttccatgtgcacgagatggctcagctggggccgcggctcctgaacctgaggagactggcgttgccagaccagcttcccctgccgtgcacacggctctcacagcggcagcaggaggcgcgggcgcggcacgcgtagtgctagtctcttgggttttagtcatctgggtgtatagtgggagctctgtgatttattttttatttttttcttttgagacagagtctcactttgtcgcccaggctagagtgcagtggtgcagtctcagctcactgccacctctgtctcctggattcaagggattctcctgcctcagcctccagagtagctgggattacaggcacccaccaccaagcctggctaatttttgtatttttagcagagatgaggtttcaccatgttggccaggctggtcttgaactcctgacctcaagcaatcttcctgctttggcctcccaaactgctggaattataggcgtgagccaccgcacccggcctctttgagatttaaatctacattttccagattatcaatgaggttgagcaactttgcatgttgattggctgtttgggtgtcttgttttgtgaagtgcctgagtcttttacccatttttaccctgggttgtccgttttttgtgttgaatatttcaccattaagtatgatgtctgctttagaattttgttgttgtcgttggtactcttcacattaaagaagttcctttctctatctagtttgtcaaacagtttttatcattaactggtaaaaacatttgaacttgcagttttctttgtgggaaactttttttttttttttgagatagggtctcgctcttggtgcccaggttggagtgcagtggtacgatctcggctcaccataatctctgcctcccaggttcaagcggttctcctgcctcagcctcccgagtagctgggattaacaggcgcccgccagcacgcctggctaattttgtatttttagtagagatggggtttttccatgttggtcaggctggtctcgaactcctgacctcaggtgatctgcccaccttggcctcccaaagtgctgggattacaggtgtgagcccctgcgcctggctgtgaaactttctaattatgaattcaatttattttataagttgtggaactgtgcatattttctttttctttttttttttttttttttttgagtcggagtcgcactctgttgcccaggttggagtgcaatggcacgatctcggtttaccacaacctctgcttgtgttcaagcgattctcctacctcagcctcccgagtagctgggactacaggccgtcgccaccacgcccagttaatttttgtatatttttgatggagatggggtttcaccacaatggccaggctggttgcgaactcccgacctcaagtgattgattgcacctgccttggcctcccacagtgctggcattataggcatgagacaccgcacctggactcctttcctctactttctttgggttaatttgctagtctctttttattatttatttatttatttatttatttattttgagatggagtctcactctgtcgcccaggctggagtgcagtggcacgatcttggctcactacaagctccgcctcctgggttcacgccattctcctgcctcagcctctcgagtagctgggactacaggcgcccgccaccatgcctggctaattttttgtattttttagtagagatggggtttcactgtgttagccaggatggtctcgatctcctgaccttgtgatccgcccgccttggcctctcaaagtgctgggattacaggcgggagccaccgcacctggcctagtctctttttaaacgcttgagatgaatttttgttgcttttctctttatatttgtttcaaatatatacagttaaggctgtacatttctctctgagcccggccttaggtgcgtacttgtttgagagacagctcatgttggccgtgtctgtgtgtcacggaagtgctgtgattcttgccttttcctgctttgtgtttgtgcctttcagccttgtctttgacagcctagagcttgcctccttgcagcaggagtccgtgacccaagtctgggctggcatcttgcagtttagggtaggagtcagggtgaacttttctgaatgggttcacttacggcctaaaagtgtcacatgtgagctttgtaggaagggaggaactaccctgacctccgggaaacaggagacatcgggctgtatgtcagtggaaatgcgaggtagtcgtgattgtcacttgttcaggaggttgacggaggatctgccaagccaaaggccgcattggacacagagatgggatgtgagtgaggtgggcagtctccctgcctccgtgagctcaccatctgggttggcctgtggtcggggggccctgtggggttgtggggtagggtcagaatgccggcttctgggggtgggggtgcttcttccttctgaggaggctaaagctctctctctgatttcattcacgtgccggtccacaaaggaaagactgtagtttcaaatccaggtgctatggtgtcttgtaccgagcgagggctgccactcagctgcggcagcgtgttgccgagtgacagtgcagccctctcacggcgaacccagggggtaccaagcagtgtcagacactcttggcacatgaaacaaaaccatttttccagctcaggcgtgacccgaggagtgagtatggcttttctttgggtccccgcagtaggggctcgtgtccggcagcgtgtctcattgcctgtgctgtcttacagatcgtgacgtctgcatccacagatctccaggattacacttactattttgtcccggctccctggctgtctgtcaaactgctgagactgctgcagtgctacccacccccaggtaacgcgcaggccgcggctcctgaagctgcaccagtgccagtctgattccctgtctcagatttaagtggtttgtttgttattttaagaagtgtgttactagccctgtctcttgattcatggacctttctgccagtgctgctgtatgcgctggctttcgtggagcagttattgcagagcctacagttttgttagtgtttgggtctatttgtgcttttatagtatcagatttgtgcaggttttctttttgagatggagtctccctttgttgcccaggctggagtgcagtgacgcgacctcagctcactgcaacctctgcctcccgggttcaagcgattctcccacctcatcttcctgagtagctgggattacaggcacctgccatcatacccggctaacttttgcgtttttgtagagacggggtttcaccatgttggccagtctgttcttgaactcctgacctcaggtgactggcctgcctcggcctcccaaagtgctgggattacagaagtgagccaccgtgcccggcctgtctcagttttgtaaatgcttccagctgggtacacaaatgtgaatgaactatattaaaaatgctctcatgatgtatgggtgcagccgggaggggcagggtgggctgcgggccactggagactggtgagcaccgttctgtcttgcccagaagaccctgcagtgcgaggccgcctgactgagtgcctggagaccatcctgaacaaagcccaagaaccgcccaagtcgaagaaggtccagcactccaacgcgaagaatgccgtgctcttcgaggccatcagcttaatcattcaccatgacaggtgtgtcggctgcctgtggagaggcttcgtctcgcgcacacacacacgttccttctcgttggcacgagactgggcggatcatgtctggtttgtccactccatgggcctccccttcgtcctgcctctgtgctccctgccggatgctttttttctttctgtgcagcccggcccctcctgctctgagctcaccgtggattgctttggtgactgtggtctcatcccacacgagggccttttcctccttcccctgagcatccccactcctgactggcttctcatgtagtggaacagagaggagacgggtggggtggggggtgtgcgcgcatgtcccgtggctttgctggatgtggagccgcacttggtgggtccagggtcgcagggcagtgctggaaacgtctgtgcccatccacgaagcgcagaggcgcagggtggcggtcgctccacacagcctggagggtctgcctcctctgctcccacgccttctctgctcagcagttgcggcgcaccacatgtggtctggcgtgggtcttgcgtgtggggccatgctttagggtcctgtgagaatgagatcgcagttctcaccaggctcccaataatgagggcacgtgccaggctgtgggcagacgctctctacagcttgtgaacaccacccatttgctactacagcatttttacaaatgatgaaaactcagtctgagagtcacacttcagaactgagagttattaaaactgaaatttcccattttggagaaagctctgttgttatgtgaggagaagccacatcctgaggagacagtagagtcagtggggcagcagccgcgctcccggccttctcggccttctccctgccctgggctggtgcctctggctgagaccccattgccggtcacagcttgaccggcctcccgcgggcctgatgcagattgaggctcaggaggtgctgggaaggctccagtggacacacgggctgctgactcactgtggggatgcacaggatggacacaaaatggatgtcaggggtgggggtcgggcgtcatctgcatctggggaggcccccgagttcccacttgagcagtgtggtggcggtgagtgccgtgtgactttgctgtctgccatctggacccgtcggggaacgcagactctgtccagtttgtgttgcacttgctgaggaaaccccacccacttcccctccctccacacagtgagccgaacctgctcgtccgtgcctgcaaccagttgggccagtttctgcagcaccgcgagaccaacctgcgctacctggccctggagagcatgtgcacgctggccagctctgagttctcccatgaggctgtcaagacgcacatcgagacggtcatcaacgccctgaaggcgagtgccctgtccttgggttctgctcactccctgagcaggtgccgtgggtcttcctgtgaaggctgggggtacgcagtgcctcctgactccccgcagagatggaggtggtgctggtgctgctggcctccgcctgtcacctactcttgggaggtcacaccactgttgagggccatgctgcctggagatggccgggttggccctgctgtcctggttaggctgagcagaggagtctctggcagccctttccctgctgggggcagcccccgtgtgccatcctgcgcgtgcatagtgctgacaagtagaaatggttcttcttggtagaaagatgaaatttttttcccttatctccaagaaaatcccccttttacaaaggaaactcactttgttcggggattaaaatttcagagttggggccgggcgcggtggctgacgcctgtaatcccagcactttgggaggccgaggcgggtggatcacaaggtcaggagatcgagaccatcccggctaacacggtgaaaccccgtctttactaaaaatgcaaaaaaaaattagccgggcgtggtggcggccggtgcctgtagtcccagctactcaggaggctcaggcagaagaatggcttgaacccaagaggcggagcttgcagtgagccgagatcgcgccactgcactccagcgtgggcgacagagcgagactccgtctcaaaaaaaaaaaaaaatttcagagttggaagagcccagttgaggttggccattgccagcctttgcgagtctccagagcgaccccgagggttcgttccacataggggaccctgcggtgtgtccaccaagtccctagtcaccggtgcacatgcgttagggagtgggaggcggggagctgcatgtcccccatctggctcagcctcaggctgtggcagggctgctcccagtcccccgcacgtctgcgtgcagctcacagatattccgggtggtgtgcaaggggctcgtggtgggcatttggtattctggattcttcttggtcctggttttggtgtttgttttagtcaatccctattgtcagaagggctggacactcatttgcacacggccagtgctagcgctggtggtgcccactctcctgcctttgttgggagcagagctcgggctttctcgtgctgcagagcctcctgggggcccatcagcacgggctctggggtggggcgtgaggacctgccttggggcagctccgtgtccgaggcagtggggtctttggctgcatggaagggagtccttgatggcctgcaccaggcagtgcgctcagtcctagcgaagctggcccttgtggagggcaagggaggcatggacgagcgggcagaatccaggcagtgcgctgggtcctagcgaagctggcctgtgcgggagggccgggccagcaggcggaactctattccgggctgtccagacacacgtggcccgagtgcaggtcggctccctggacctggatgtgcatgtgagggaaactcagagtgggtgttgagatgcgggtgccgagcctgtccccagcctgtccccaagcttgtgccttgctcctgcgacctcttactctgtgccttgttccccagactgagcgggacgtgagcgtgcggcagcgggccgtggacctcctctacgccatgtgcgaccgcagcaacgccccacagatcgtggccgagatgctgagctatctggagacagctgactactccatccgagaagagattgtgagttctggtggcctctgagtcctctcctgccacaggcgtgaatctcagcggcaggatttccttcgtgctctgcgattccgtccagcaggacttgattgagaacccatgagatgctgaatacaaggctcctctgcctctgtgttttcatccacattttcaagctgggtgtggtggcacctgtggtccccgctactcctgaggtggaggcgggaggatcacctgaggccaggaggttgaggctgcagtgagtcgagatcatgtcactgcactctagcctgggcaacacagcgagaccctgtcttaaaaaaaaatcagcatttttggtagagtcgtttggtcttgaaaataactattggccgggtgtggtggctcacgcctgtacaccttgggaggccaaggcgggcggatcacctgaggtcaggagttcaagaccagcctgacaaacatggggaaaccctgaccccgtctctactgaaaatacaaaattagccgggcgtagtggcgcatgcctgtaatgccagctactccggaggctgaggcaggagaatcgcttgaacccgggaggcggaggcggaggttgtggtgagccgagattgcgccattgcactccagcctgagcaacaagagcgaaactctgtctcaaaaaaaaaaaaactaaaatgcccgtcctgcgcggcttctgtggcctgcctgtccttgcagtggtggcactgtagccccaggtctgagtgaggctccagccgtctgcgctggggctgcacaaatccagactcctgtgggcaaaattcttttaattgtgttgcattttgagcccttgaattaatcctttgtggcttggcttttttgggtgtccctcttgatctctgggaaggacgggatctaggccatagcttaatgtcccgtgttgtttttattcacaaagtaggtgtgcacacttgccagatagctgaagctcatcaaacctgtacgtgtgaaagactgagcatgaaccaaaacctgagggaagaaacccttgtggaggccacatggtcagcagagaagagggcctgaggcctccaccacactcacaggcctctcaggctcaccgtgtctgtggatggtggggtttaagggggaggcccggtgtcctcgcgtggggttcgccactgtgaccagccaggaccacagcctcttgttgaggctgagacagcgcctccgttgtatagaaagcgctttgttatttgttttttttgggcgaagtgcggctcaaggcctccttgggagctttgccgagagccagtgttggagctagtggcaggtgacagggttgctctgggcaggtgttgtgtggtcatgcccaggtgagagactcgggttttcaggggtcttttagtgaacggaggagcccaggtgctggggcttcaatgctgaggggtgaaattaccatggactgagcttcagtgaggcactgcagacctgcagagagcaggggccaggaggcggctctcacgctggactgtccaccctccaggacagtgggcctgggaagttgagggggacagggacggggtgggctgactcccggcaggaggccccaagggcaggcaccgtggtgtagggcagggctgtctgtagaggggccaggcaggtgctcgttgactgtagccagtggtccctctctggcctggctggggcagtgtggcctggtgtcagcacttgtggtggggtggggctggctctggggacggccgtcacgggagcctcgttcctgattgttgttctgggtgttttgaacagagacagaagcagtgtgcttctgagtgcagttgtgcagattttgaggtcctgggcattcgtcagcccggtgtctgctctcgcccctctgcgtgatgagcggcaatcctcagccagctcctgctgtgaggagtaagacaggtgctgtgtcttggcctgcatgatgctccccccagcccgtcctttcagccggacatgatgctcccctcaccccatcctttcagctgggcatggtgctcccccaccccatcctttcagctgggcatggtgctccccccaccccatcctttcagccgggcagggtgctccccccaccccgtcctttcatctgggcatggtgctcccctcaccccatcctttcagctgggcatggtgctccccccaccccatcctttcagctgggcatggtgctccccccaccccatcctttcagctgggcatggtgctccccccaccccatcctttcagtcgggtatggtgctccccccaccccatcctttcagtcgggtatggtgctcccctccgtccttttagccgggcatggtgctcccctccatcctttcagccgggcacgatgctccccccaccccgtcctttcagccgggtatggtgctcccctccgtcctttcagccgggtatggtgctcccctctgtcctttcagccgggtatggtgctcccctccatcctttcagccgggcatggtgtttccctctgtcctttcagtcgagcatggcagggcgtgttctctggctgtgctaggtgctaagtgtccaaactggacatggcccactccctgcctactcggcaccttgccatccatggagggggacggattgagagcaggaccgtgggttgctgtgctgtgggtgggatggctggaggaagtgcctcatgttctgggggcctcaggaggcattacactcctggggggctgtgtggacttctgcagaaggtgatagtggcctggtctggagaggatgatggtgcagaggctactgggagggcagagcatccgttcgtggaggggtgggaggtaccttagcacaggctggggagcagggcacgcgaggcaggggtggaagcagacatggggaccctgccagtgaggcctgagggcccctggtgcacagccgtgagctgcgggtagggctcagaggcagtacattttggaatgatgccctggaagtgtcacggagtcaggttggggtttgggggtccaggctccaggcagggacttggggtgggggggcacagtcaccagcacctgagaggccagtggcagggtgtggagagggggcggcagggtgtggggaggggcggcagggtattaggggtgccctcgggaggtgcgcggtcttgatgcctgctggcgttggtgttggcagctggcgctgttcgaagggggcttggttccaggcgaggtgactttggggagatgagtttggtgttgtacagcctggcagagctccatgtgggtggctgccacgtgggtgtgggctgggcaggtgcctccggggggcacccgtgagagtgagccagagaggggaagaaggggaacccccaggtgaggctcgcaggaaagactggccagagccggaagaaaccagcagagaagtggccgccgggagcccagggtggcgcagtcactggccgccgggagcccagggtggcgcagtcagaggtcagaggagtgctgccaccgggagcctagggtgatgaggtcagaggagtgctgccgccaggtgctggggctttgggagagaagggcccaggtgggaggtggcctggctgtggccgtggccttctgtgcactggtctccgcctcttcctggctttctttgcttaagtcagggcatcttaaactttctgggctcgtgggcttttttgagaatcgagttcaagcttcctccatgtcccaaacttttgtagacacattgaggtgcttctgaaactctcactttgactttggacgacagtttggtcttgggattgccatggcctgcaggtgccggccctcagcagcctgtcccccacaggtgctgaaggtcgccatcctggctgagaagtacgcggtggactacacctggtatgtggataccatcttgaacttgatccgaattgctggtgattacgtgagtgaagaggtgtggtaccgagtcattcagatcgtcatcaaccgggacgacgtgcagggctacgcggccaagactgtgttcgaggtatggcccgcaggatggcaggaaggatggggtggagggcagttgcagaaggtgagcagtgagtggttccagcctgcctgcgtggaggtgccgagggccgttgctgacccctcttgcccctcagctcttccctgaggctctagctcctccactgttggtgccccttgctgagtcccagtttcttctcaccctaactctcaaacttctggctctctgggggccacctgagaaagccggcctctgtgtgtgtgagagcatgctggggcatgccgtggtggggcctgccctgtccgtcggagagggttaggccaccggcaaggggtgtgccatgaggacgctggcagaacctccccagccagagcctgttgtggatgctgcagctccctccagggcaggtcagcgtgtggcagccttgggttccttgctgctgacacaggtactgagggtgctgaggaaggcagggatgggcacttggactggggtctccaggaagctgaggggctggtgctggtgtagggtgcaccgcgccaggacgtgcccgcctcgccttaactctggcacctggctgccaccccggctcattgtttgtgcttcgcaggctcttcaggctcccgcgtgccacgagaacctggtcaaagtgggcggctacatcctgggggagtttggaaacttgatagctggagacccgagatccaggtgagaggccctttgcgagtcggggctgtgtgcgctccggcgggcctctcggtggtcggtggcaagaggcgaggcaccagctggccctgccgtgaggcctcgcagagccgcttctgctccccatcggcgtctttttgttttccttcagttgatagaaaaagcagggattctagtagaaaatggagacgtggggttgatggctgacttagtgaaaggggcgtctttgcggtgggatctggagctggaagagggtcccgaccagcggcctctggtgcaggccagggggtctcgccgccgtcccccccccgcgggggcgtgctgcagcctgcgaggggacgacggtgtccctgtgttgtgcctccccgtccccagcccgctgatccagttccacctgctgcactccaagttccacctgtgcagcgtccccacccgcgcgctgctcctgtccacctacatcaagttcgtgaacctcttcccggaggtgaagcccaccatccaggacgtgctgcgcagcgacagccagctcaggaacgcagacgtggagctgcagcagcgtgctgtggagtacctgcggctcagcaccgtggccagcaccgacattctggtaggaggcccccgcccttcgggctggcttggctgagggttggaggccaggagctctgaccagtcccaccctgtgttctttccaaggcgaccgtgctggaggagatgcccccattcccggagcgggagtcctccatcttggcaaagctcaagaagaagaagggccccagcacggtgacagacctggaggacaccaagcgggacaggagtgtggacgtgaacgggggtcctgagcctgccccagccagtaccagcgccgtggtgggtccctcacctactgtgcacccagacctgtcagggcctcacccccaagacttgggaccagcagagcatttgcctgtcagggaggagcatgtactgagaacccaggctctggctgtggctctggacaccccgctgtcctgtcctgggggccactgtccctgctggacacgctgctgtcctgtcctgggggccactgtccctgctggacgccacgctgtcctgtcccgggggccactgtccctgctggacgccccgctgtctgtcccgggggccactgtccctgctggacgcccccctggcctgtcccgggggccactgtccctgctggacgccccgttgtcctgtcccgggggccactgtccctgctgcacaccctgctggcctgtcccgggggccactgtccctgctggatgcccccctggcctgtcccgggggccactgtccctgctggacgccccgttgtcctgtcccgggggccactgtccctgctggacgcccccctggcctgtcccgggggccactgtccctgctgcacaccctgctggcctgtcccgggggccactgtccctgctggacgcccccctggcctgtcccgggggccactgtccctgctgcacaccctgctggcctgtcccgggggccactgtccctgctggacgcccccctggcctgtcctgggggccactgtccctgctgcacaccccgctggcttgtcccgggggccactgtccctgctggacgcccctctggcctgtcccgggggccactgtccctgctgcacaccccgctgtcctctcccgggggccactgtgcctgctgggcaaggcacttccttcagaccgtcgtcttgtccagctcagctcacacatcctctgtggtgccttgttttaggggaagtggccgtcccctctcctacaggactgcctcacccaggcagctgtcctcacatgctttgttgatttagagaggacctgtcctgccctgctcttcgaggttttatgtagtgagttgggttaggtctggttttccttgtatgtgtgatgcgatgagaataatcctgtaacagaatgtgtcctgtggtatttgtcaggtgagaagtgtcgttttgagagttgcgtttttgcttggctctgcttgccagctgttcccctctgcactgtcagggagggctcctgtcggggtcaggcgggctttctgtttgtccagttagaggacctgtctctccaggacgcaggtccagtggtggcaaccagtgctgctacccagtatcggcagggctttgtggggtgagctcctgtggtggtgcctgccctggcagtgtgctggttgggagggtgctcatgtcggagtcctggcactccttggcggggacctgcttatgtgccccggctgaccatgtgtcctgcccctctggccgacagtgcagggcctgccatggggctggtatccaggctgagcctgacatctcaatgagcagtcttccctccccctcttcctccctctcccctccctccacctagtgtcctctgtgcagcccctgtccccccgtgccctctctctgtgttgtttgtggcacgctgctgtgcccgccatctggaggcttgaattgcctgtgagctcatcctggagtgaatgaaatgaatgaaagatgtgactctttctcccaaggtgggcgtcttcccttcacgcctgagcaccttcatgcttatgtttctcatgtgctctgtagagctggtgacctgcttttgaccctgtctcctcccgtgggacgtcactagccaggcgcctagtgcagcaggcctctgtcactcctctaatccatctctccctctcctttggacatcttgacataggtttctggaggcagaaacttgcttgtggagatttgtctgtgagctgccggagcaggggccttcccgtgggtgctgggccggcagcggctccgccctgcagagaggaggacgcggccccagttgggtgaggaggcgagggcaggatgacgtgatccaggggaggctggtgtgcagggattcctggaggccggctttcagcaagggcactgtgaagtcttccacggaaacctgggattgcctgttggaagctgggaaggcaccaggtgctctcgctcccctccagctgctttgacgttaagaggaactcgctgagggagcatggaaaggggctgtaggattgtcttcagtctctctttggttcttatttgatgtttctttttaatgtgggtcctgagaagtgaggtgtgcccataccccaggcctttgatcacacccaggtttgtccggctaggctcagggtggactttggagggcctggccttgactgtgtggcttagggatcagatggaagcttctggaccctgggagtgagagcagtgtgctgccctctgaaaaggaggatgagggtccagtgaggttcagcatttctgtaaggtgccttcttggagggagttcccccttcagggctcattcagtggattttctgagtgtggcttcactcctgatggtcagtggtgcctggcgggtgggttccttagggaggtgtctgtggccgaggcacgcagctctgttctgagctgagagctgtggtgtgtgggcacctccgtcctgactgagagctgtggtgtgtgggcgcctccgtcctgaccgagagctgtggtgtgtgggcccctctgttctgaccgagagctatggtgtgtgggtgtcattgctatcctgtgctttccaatctgttcccattgctcacgggagccccagtgagaggcccctccctatggggagacactcctggcgaagttttcttgctcagggtcttctgtatgggccgtgaaggggcctcagggtggcatcagcacatgtgcctttcccacgagagacagtggctttatcttggtgtcacattggccaaaatgtcttttatttaacatcatagatgaggccaggacattttacttcttccgagcatcctctttctgcacacagctccttgggggaggctgtggtgtgcgtgtccccgggtgtgctggggagcacaggggtgtggggatcagaggctgcctggcttcacatgcaggagcctggggcccttgtaggcaaaaccttcacccctcaagttgtcctgctattggagggaggaggtgaactggtgtggcccaggagccaggcctgctccctgaggagggtctcccaggcctgagaggataaggaagatgaagaacctgaagtgggtgttaggaccctactgtcctggggccttgcatctggcctcgctgttacaatctgtggtaacgtttcaggtacaaatgcctttactagggcaaagggctttcctactttagaaagcagttaaaagccatagatggctgggcatggtggctcacacctgtaatcccagcgctttgggaggctgaggtgggcggatcacttgaggtcaggagtttgagaccagcctggccaacatggtgaaaccccgtctcttctaaaaatacaaaaattagccaggtgtggtggtgtgtgcctgtaatcccagctgctcgggaagctgaggcaggagaattgcttgaacccagaaggcggaggttgcagtgagctgagattgcaccactgcactccagcctgggtaacagagtgagactcggtctcaaaaaaataaaataaaataaaataaaagccatagatgtatttgaatcagtgcaggaaccagggtaacatctgtgatgagatgcagaggagaaactgtctccatttgggctgcaggtgcatggccatggccaaggccgatggcttcccacgcagctcacagctttgtcaggctgtggaggccacagtgttggcgggcgctgtccccggcgtagggagcaaagcgccgccttcagatggtctcatcgagacacgccttggatatttttgggactcttctctgccagctcctctgtgacctcccacccttggagcacatgagacccgtgtcgtcttctcttgcagaggtgctccgtcacaagagcagagcctgggagcctgccccgtttctgactgccccccaatccccattctgactctcacccgcccccattctgaccccccgcccccattctgacctgcaccttttttgcataacacactttgtgatgcctcatttatctttgagtaaaattcatatatcacaaacccacacatgtagtttttttgaaagtacagtgtgacaccttaactttgcattaatgtaaaatggcattcaggtggagtctcagataattacaaactaattttttaccttcttagatgtccagtggaacattctaaagttactcaagacgaatcttcaagttagggtgtcttgtgtctctgttttttgcctgtgaaatgccaatatccttgtgatagtcagagccctccacatctccagaacgctcttagctgggtggggggtttctccaccaagagcccctggtgtatagtgtcaaagtgtgagtgttgccaggctgtagttcagtggtacgatcttggctcactgcaatctccgcctcctggtttcagttctcctgcctccacctcctgagtagctgggattacaggcgtgtgccaccacacccagctaatttttgtatttttagtagagacggggtttcaccatgttggccaggatggtctcaatcttctgaccttgggatctgcccccctcggcctcccaaagtgctgggattacaggtgtgagccaccgtgccaggctgggtgtcctttttatagggagcatctgagtccctctggtgcacaggctgctgtggggcaggacccgtggagcccagagcaggtctgagctcccaaagtcaggctgctggggcattgctggggagcctgctgccctgttggatgggtgagcatgcgatggactgagctgctgcttgtgccctgttgtgagagtttaatcatgagatcataggcgctctttccttgtgcctttgccccaggatcaaagagcaattactggggccgggtgcggtggctcatgggaggccgaggtgaacgtatcacctgaggtcaagagttcgagaccaacctggccaacatggtgaaaccctgtctccactgaaaatacaaaaattaactgggcgtgatggcggccacctgtaatcccagctacttgggaggctgaggcaggagaatcgcttgaggtggaggttgcagtgagcccacaccagtgcactccagcctgggcaatagagtgagactgtctcaaaaaaaacaaaaacagagacagtctcttgctatgttgcccaggctagttttaaactcctggactcaagcagtctttctgtctcaaccttccaaagtgctgggattacaggtgtggggcaccatgcccagccaaaaagcaattattttttaaaagtatccgttctgtagacttttaatgattaataatgatttagtaataatttaatgattaataatgcacccgagtaagttatttgctttttcatctttggaagcttactttcttattggacagttggcagtaacatgcatgatcttagttctttcttttttttttttttttttgagatggagtctcgctctgtcgcccaggctggagtgccgtggtgcgatctcggctcactgcaagctccgcctcccgggttcacaccattctcctgcctcagcctcccgagtagctgggactacaggcgcccaccaccacgcccggctaattttttttgtattttttagtagagatggggtttcaccgtgttagccagggtggtctcgatctcctgacctcgtgatccgcccacctcggcctcccaaagtgctgggatgacaggtgtgagccaccgcgtctggcctttttttatgtctttcatggcaaaatttttttgagaatttttttcattcaaatagcatttgtgaaaaaatgtagggtgccttagtgaaattatgactgatgttttaagtgcagttatctttaggctggagtctgggatatactcaggaagtggctgttagccctcactctctggtcactcactgagttgtgtgccacctgccccagccactgggagtgcatggatgccaagggggtgccatgggggaggacgtgcaggcgtgagctgcctggggttggccaggccagggaggctctctgctgatgctctccttccttctcttccagtctacgccttctccgtcggcagacctgctgggtctcggggctgccccccctgcccccgcgggccccccaccctcctccggcggcagcgggctgctcgtggacgtgttctcagactcggcctctgtggtcgcgcctctcgctcctggctccgaagacaactttgccaggtagtcaggtttcctgagtcctgcagacaggcacggggctgccgtgccccctgacttctggtgtggccgcggccagctggacagaggtgggcagcggagtttacctcccagattactgcctgggggagagagcgggagctgctgtgttgtgggtgggtttgctgtgtcattcctctcacaaccttgatttatatggactgcagtgttcattactctcaggaggaaaaggaggacatgaaagaaacacactgtctgggtggtggttgtgtcctgtctgcacggtgatgtccgatcatgtttcagctgctgtttgagtgttgataaacactctttgtagctacacgtctcctctcttcgcctctttcctgtctagttgggctgcttttcattctgacttaagccgtcttgtctgtgtctgtcctggaggcccggtctcttgtccttgagttgctcacttgctaagtccttctgtgaggcccaccctgctcacgccttcggcctccaccctgtggttccccctgagggcagcctgtctttgctgcttgtcctgctctaatttctgtccggtgcctgggcacctcccggctccctgtgtgcagtggtctctgccagtgtctccgtggtcttcagatcgtcggtgctgaccactttcccccgcacgtgctctccccagccctctctgctgggctcatcagctgtgcattccgcttactggctgctctcagccatctgcttgttttcatgtctggccggaggtctgaggtgccccctttcctggagttgacgcctctcccctgctgccctgtggggtgggagcgcaggtgccggtttctgtcccagatggaggttagagagcctttgaggaatggccttttggccccccattttgaagactgtaatagagttctggtgtttttcagttctttgtattcatgttgcacgtgagttctgtttcctgttacgtgttgggaaaggacttaggagaggcaggccggcgtggtggtgggtgcaggtcgccgcttgggctgaaaacagtcttactgctcttagagtcgctgtgtttgagattgagaatccaggttgcagggctctggtggtggctgctcctcagtgtcttggtggcaggaagggaccaggggctgggcagtccgtggcagccgtggcccttccctgctgggcgctgcctgccctgtctccatacggctgtgctgggagctgcacatggcccttgtgcacgcctcacattgggtggcgctgtctgcagctggccaggcctcggggctcttgtgcatgcggccgtcttggctttgatctggctacagagggtcatcaggtgtctgcgtgtgtttggtgtaggatggaggcacagagtgcctcagggcgagccggctgtggtggctgctggcacacggctcacaggacagggcggctgcattctcatggccttgcagagtggtttgcattttccccaaagattcctccaggccaggttgtagttgggatgaaccaagcagagatactgaccacaagggcctctctgtcacgtcatgggtggtccgtcagagcccctcccgtgttcttgacagattttactttaaagtggcttagtccacaccctgagtgtaaactccgtggcccctcgcgtggagtgcccgctggctgtgggcggagcagcgacccgggggtgcggtgagcacgtggacctccgcctcggccggctcctcctgttaagcgatctctgctttgttagccgcctgctgtgagcagtcccaggtgaagcccagtagacatgttccaggctgtgttgtggatcgctgtcctgtgttgtgtgttgcttagaccacacttgactttttgaagcttcgcatgtggctgcagccggaccagcagcctgccgggctgtgcagggggcggctgtggcctccagaggtgtgcgcagggactgctgcctcagcggctctcgtggccgtggcaggctggagtggggcattgcgtggcgagcagcgccctcctggccccaagagcgagccaagggccgcctgtcactgccccttgccgtctgttgctgcttcctctgtcttcctggcctggtctccatacagcaggatgccgatgagaaggttggcagcactcagaccttccagggtggcagctgtggtgcagttagtggagactggctgcaggagtggctgaccttgatcgccgccatgtcagcacaggtggaggtggagatttcagaattaggctgctgccgtgcagcatttgcttcttaggcactggggtgggttggagggagggggcggtgccatgacctcctgcctccccaccctgtggtttgaatcagtgccacatccatctctgtgctgggttcacccaggagccctgtgccactgccccgcctccctctcctctcttttggatctaggtcactgtggagttacagtttcctagaggaggtcagaaaacttgaagctcttctgagagaaacacaaatgaaagctaaccaacgctattttattttcccctaattctgtgtagtgtagataggtgccctgtggtgagcaaaaccctgggctccctgtgcggtgtagacactaaccacgcatggggcgagaggagaggccagaggggagatgggggcgcccagggccctgcagggctgtgctgctggtgggtggatggctgggtgcccgtgcatgcgtgtgcatcagcggggagcagccaggctctgatggcgaggccctcgctgggtggaagctcagcacccgtgttggatggagtctgtggtggggccagaagctgtgtgcgtgcctcacgcccgtgtcccttctggggccgtgagaggccgttacatgtggaccagcatgttcctgaaaagcagctgcaccaaccaacttcacaggtcttgccggggctgtgtccgcgtccctgcgtcctgctcaccgtcctcctccagtggctgtttgtcaggatagtccttggaatagtttccacttttttcttcccttgtgtgccatagaggtttttctggcctcctcgtgctgtgagtttttttccagaacaaacccttgtgttttctgcaggtggctttgagtgacacatatactgtcccttttcccctaggtttgtttgtaaaaacaatggtgtgttgtttgaaaaccagctgcttcaaattggacttaagtctgaatttcggcagaatttaggtatgtgttttaattacttaatgaaactgtctcttagaaatatgggaaattaagagaaaatatttgcaaatcatatacttataagggatagatatccagaatataaaaagaactcccataactcagtaagaaagcagcccaattaaaaaatgggcaaaagaacagcctgggcaaacacatcaagaccccatctctacaaccagagggggtggcggggaggtgggggtgggtgcaaagttgttgaaaagacgacattctccagggaaaatacaggaatgctcaataagcacctgaaaagatggacaaagtcacgagggaagtgccaatcaaaaccacagtgagctaccacctcacccctccaggatggctgttagaaaacaaacaagcagcctgtgcagtggctcacgcttgtaaccccagcatgttgggaggccgaggcaggcagatcacttgaggccaggagttcgagactggcctggctaacatggtgaaaccctgtctctaataaaaatacaaaaattagctgggtgtagtggtgtgtgcctgtggtcccagctacttgggaggctgaggcaggagaatcacttgaacctgggaggcggaggttgcagtgagccaagatcatgccactgcactacagcctgggcaacagagtgagactctgtaaataaataaataaacagactggcctggtggcctggtgacttaggcctataattccagcactttgggaggccgaggtgggagggtcacttgagcccaggtgtttgagaccagcctgcacaacattgtgagaccccatctctacaaaaaatacaaaaattaggtagacgtgctggtgcacacctgtggtcccagctacttgggaggcaaaggtgggaggatcgcttgagcccaggtgtttgaggctgcagtgagctgagatcttgccactgcactgcagcctgggcaacagagcgagaccctgtcgttcattcattcattcataaataatgcatacatcattatttatgtatgcataaataaccaaaaaggaaaaagagtgtctgcagggcgtggtgacgttggagccttgtacgccgctggtgggaatgtacagtagtgcgggcactgtgggaagttcctcagaacacaaaagaagatggaattactctgtgacccagcagttccacgtctgggtacagaccccagagaattgaaagctgggtcttaaagaggtacctgtccacccatgtccaatggcagcactattcacaatcaccgaaagttagaaacagcccagatgttcatgggtggatgcctaattaaacgaaatgtggtctgtcgacgcagtggaatattattcagccatcaaacggcagaaaggaatgaaattctgatgcataaagcagcacacatgcaccttgaggacatggtgctcagtgacacgggccagacacctggacaaatcctgtgtggctccactcatgcggtccctagagcagtgacttcgtagagacagaacgtagctgggggatgccagggcctaggccagggggatggggaattggtgtttaatggggacagagttccgtttgggaagatgagaacgttctggagatggtggtggtggcagcagctgcacagtgtggatgcacttcctgtgcccttgtgtgcacctaaatatggctaggaaggtgaatgttagtgtattttaccacaatttaggagaaagacataaaaaagcctttgagtgtaaaaaaatgctgtgcacggaaccctgtggctgcaggggccctggctgcggacctgcctcctctcagcgcctgccttgagcctcctcaggactgctctctctctcatctgtgaaaaacacagaaagaatgtgaaaaaagagaattagtcctctgcccgccaggggtctgttagaaaagtgagggttgtcagagtgattcctgtgggaaacgctgcattgaaaacaggtggtgcctttagtcctggtttaagtttttaagctctgggccgtgatagcttcacgaggtgttggttttgggtttttaaattgtgggaggagtgatgccaaactgtttactgttttcaaaatatttgagatttcctttctgaattcaaggggtatacagatgttcacaaagattttttactgtgatataaataaaaacagcgacacatcctaaatgtgcacctgtgccgtggctgagccgctgcagtgagggctagtgtgcaacaccgatgctgtgctggacgcgtgcccagccgggtcccctgacaggaggcagccggggccggtgcgtgtgtttgcatgttgcagtcatggggcggggccggcagaggcctgtgtgattgtggcgtccctggaaaagatgcttggcaggcccctccagctgtagcccagcctgcagacggggcgttctgtgggtccttccccgtgcatatgcgtgtgatctcacccatcccgtgtgggtgcgcaggaggggccgagggaggagggtgctggagggcggaagttacctctgactggaggagatacccggcccgtgttaccagcactggtgtgctcgttctaaaactggaaaaaatttgttcttaattttaacaacagtcatacatcacaacagtgaacttaaattcagctgaagattgtggggggctcttgtttttcagggtaaatattcagggtaagtgtgaaatggtgtgtgtgaaaaaattgtttttgttccttctaggtcggatgtttatcttttatggtaataagacctccacgcagttcctaaactttaccccaacactaatctgttcagacgaccttcagcctaatatccttggcttcattgccccatgcccgcagacagcataatgtggggcttagaggaggcttttgaggaagttttttggttttcttattttgttaaaatagcgagataattccagatgctatatgaaaatcaggcagtcgtaatctgcctatggtgctgggcaggagaaggaaaacaggcagtcttccatattggagagccagcttttgatcatgcacctaaaaataccgtgtacatgcctcctccccttccatctggccagtgtgagtccctttccttttcacctgctcttactctcctgtgacgtgatctttaaacccctcctctccgaagcctcacagagctgctgcttgcagagtgtgggaggcgccagtggggactggagcgcggtgcgcaccccagccgagcttgtgtgtgcttctggcagagcttttagactgaagattttcccttcgtaatgccagaagcgttcctagaacttccccagctaaaacagggagacgctaacgtctctacctctaaggataggcccgccaaatagagttagcgtgaagaccccagcttgaccagagatggtgacacctggggatttatggtcagcgacctgagtgaagcaacatcctccttgccactggctggtctgttcattttaacatgaacatgttttaatgcagactgttcaagctgtttcaaaacagtcattaaaaatacacatgcaggagcacctgtattaaagactttgtttggaatctggagtggaagctctgactcctactgcgcccttctttaggggtctctccctcggggtccacttggctcgaggcggcagcgagcccagcagctgagtggccggcggcacacgacccagagggaaggagaggcctgcaccccgctgcctcctggacccagctttgctgctgtcactgtttcttcaggagaggctgtaggcaaacccttgttttccagcatgaaaacaaccctggtcccagcagggcaggctcttttctgtgtctcgctgtttcaggagcctgctattcctgggattcttaaagttttcctgccctactaagcaccagtttctgctaacggtgacaaaaattgtgtgtgtaagacccagagccgaggctcagagtgaaaacagacaagtagtatataatctaagtgactttttaaaatggaggagccattctggaagcgtgagaagcagacagtgttttgaggattgtctgggtggaagggcagggccgggtggtgtggctgccctcgacccgtagctggtggtcctagagtgtggtgagtgtgctcgcctccacgggtcctgctggggctctagcccggcccgtttccgcttctgccactgggacttgctcagctggattccttaacgcacgcacacctgaacctgcagaccaagcccgtggacccgaccgtggaggggggcgcgcaggtgcagcaggtggtcaacatagagtgcgtgtccgacttcacggaggcgccagtcctcaacattcagttcaggtaagagccgcctgtgcgccccgggccaaggggtgtgtgggcgcctgagctgtgtgcctgggctccatgactgtgcctccgtgtccttcctgaggggacccggggcgtgcgggtgctcacggtgcatggatgcggcctgagctattgctgcccccggctctgcagagcgcaggaaacaaggggaggcggagccctgggctccgggacggcaggtggcagctcccacatggggccttgctaggatctttctgggcaccatggggcccacctcatggggtggcagacagccagggcccccgcgccacctgcccggcttggtaccagacgacagctgtggggtgcaggcagctggtttccttcggccccctggcctggggggcgcgttttttgctcagttgagctcagatcgtaccactttgcttattttttaaaagcataggattttcctgttgcgactgttcattactctcacttttcagtgactacaaatagcgtggatacagtcagcccgtcccctgctgggtgtctgcaaggttaggaatgttgagaaaagcacactttctaacattaaaaagacagagaacttaagattgtatactgtagaattcggggacatagacatgcaagtttttgtttcattctttgtgcaaatgcctttgcctttttaaagaaaaaacatcacactatttgcacagacttggagttctgggaaacagatgaatggggagaagtgaggcacagggacgtcctgcctgagtatgcggccctggcctgtcctcctgtctgtgggtgacactggacactgagccacacacgatccgtggggactgaaggctcggccccccgacccgctctggtgggtggcagtagatcgggacgcttctcactccaggctctttcccggtccctggggctctcagaggagtagctgactgtctctttctgctgctgctgctgctggcaggtatgggggcaccttccagaacgtgtctgtgcagctgcccatcactctcaacaaattcttccagccgacagaaatggcttctcaggatttctttcaacgttggaagcagttgagcaagtgagaaacctgtttcctgtaggggtcaggggtggggacggggctcatttgaaaaggtgggttttggtctctggcctggctgagaacactcgcctttgctgtttctcacagtccacagcaggaagtgcagaacatcttcaaagcaaagcacccaatggacacagaagtcaccaaagccaaggtaacacgtctggagggacggccccgggggacacgcagcccgtgaccccgcgccagggtctggagggacggccccggggaacacgcagcccatgaccccgcgccagggtctggagggacggccccgggggacacgcagcccgcgacccagcgccagggtctggaggggcggccccgggggacacgcagcccacgacccagcgccagggtctggaggggcggccccgggggacacgctgcccgcgaccccgcgccagggtcctcattctcctgtttctttggacagatcattggatttggttctgcacttcttgaagaagttgatcctaatcctgcgaatttcgtgggagctggaatcatccacacgaaaaccacccagattggatgcctgctgcgcttggagccgaacctgcaagcccaggtcaggccctcaggaaatggtggaacacacttgagttgctttttattctggcacaatgtacgtggtgagatgtgtagctctttagtgcagttcagtcagttttgacagatgttgtttaaccaccaccctgtcaatacatggttgcctcccagcctccccgcagctggccaccgtggagcatcatccctagtgcagttcagtcagttgtgacagatgttgtgtgcctgtttaaccaccaccctgtcaatacatggttgcatcccagcctccccacagctggccaccgtggagcatcgtcccaccatggagcagcctggccctgggcggtggctctcccagctgttcctctctgtcaccgcgttgttccttctcaccacgtcccgttctggcgacggacacctgtctccgtttcacttgggtggcacccaggagtgctgctgtcgcccagggcctgtgtgtggttagtgctgcaagaacatcccacagcttctccaggtggccgtgccactttgcactcccgccagctacgtacgagacgccaggcgctcccatgccagccctcagttttcatgctgacagtgtgtgtggtgctcaggcctctgccgagttgtgggtgcctccagagagtggtccctgggcatggcccacagggttctgcatggcggatcctggacccgagggctgtgtgagcctcggcgtgcccgttgacctgctgtgctctctgtttcagatgtaccggctcacgctgcgcacaagtaaggaagccgtttctcagagattatgtgaattgctctcagcgcagttttagtcctgaggatggaagaccaggctcgtgtgtcttgtgttgtcttcgtctgtgccgtttgtcttcgtggccatcctgcagatgagcaccgtgtccagtgccacagcacaaggcgcctccccgccccgccgccccacacctctcccctttgggctggacgggaacacacgtgtgtggctcaggaggaaaagctcagcctggactgtggcagccacggcagaaggtggatcttgggatcaatttttataaaaatcgagacagttctgtggttaaatctacaaattaaagggaaattagaagttggcgtgaacgtggcgtttgtgggagtgtcactgagatggcccgtgctgccgcccaccccgcctcggagcctctgggagcagcagtgccactgtgcatggcgtgggctgagccttggtgtgtggccgtcctggtggctgcacacctggcgtcgtcctgggcccttgggaggagcacagctgaccctggttttgctgcagtcccagctggactgttttcccaggcaggattttaatctagaatttagaaacatttgtatttgtaatgacttctggcaaaagcacgtgtcctggccggatgtaactgttctcctttcccagctcctgtttgtgaagggcgtctgttatgctcctgcagtcgccgaggccttggatgtgcagccaggggaggagcgtcctgccggccccgcagggcccccaggactccagggtaaagtgtgggccggtggcgcaagactcagaggtgtgctcgtctctttcctgtcagagtgggcgtccccaggccacggtgcaggcctgagtccttccaccggccccgtccagtcgtccctggaggggctgtggaggagggacgcctctgtgtggtcaggaagtgaaggggccattggccgcatgccatgtgccacctgcggcttgtgtctcacctgtcatctggactcagcacccaggctgcacgtctgacacctgagaggcgagagagtggggccggcctaggagccaaggctggggccttgcgctctgtccccaggatggtggccttgtttgtcctaaacacacccagcacaggttctggcttcctgacatgctgtggaggcagggagggtgggtggccacatgtgcttgagggttttcaccctggccctcagttgcctgctgtgcgggtccctggggcagctgcaggggctcatggacccatcagggtctccacagctcccctgcagtgtgtgcaccccacaatgtctgcggctcttcttccggcgtgtcgggctttgatcacagcatagccacgtcagtggcgtgcgcctctcgcacaggccattctgggtctggtggtgccaggtgccgtgacacgccgtgctgggcttgtgctgcagctgggtggtgtggccctcattctcatgttccagctgctgggcagtgctctgcctgtgtgctgcgcctgcaggctgcgtgtgctgccgtggatctcctgcatcccttgacccctcccgccatcagaggaaaggctgctccccgaggcaccgcttccctgtgcggcgctgcagaggggccctcagtgtggcactcctcgtcaaagaaaaataaaggctagaactgcaccccggatcacgcgctttctttggggggaaagcatcccatgtaaccctcatagctccccgggggtcgcgtgaggcacagaccccaaggtccccgacctgtccttcagcagtgggctcacgggcagcgggcatcagaaagtgacctgccctttgctccgccggtttgattctgggtgtgtggtggagctttttgggactcaggtcatgcgggaacccctccagcctggccgcagggctccccactgtacagtgtgttgaggtgcagcccagggctccttcctggggaacgggaggccccgtggggatcctccagttgatcctaccacagatggtgcagaaggggctctcgggcagatgggggtggcccccggaggacggtgggcttcgccagagacggaacagtcctaatggagggagggcaggggcccaaagccagaggcagcttctcttaccagcccagaccctgctgggggcagccctgcccaactgcagatcccaggggcccacagggtgcagatgtgggtcgggtgcctactaagggactggggagaggcaaaagcagtgctcagggaccagcctctgtgccttgacaagaaccggtttatttggagtctctgaccgggtgacgccctctcccaaggacaggctgctggggatgggtgtggtgctggtgggggccttctgcctggctgggagcgggggcggctgccctgccctcgctgccaccctctgccctccctgactctggggatctcctcttctctgtgctggtggctgcctgggcctcttgcccccatctcggcacaggtttccgtgccctcctcgcccctgatgggtctggtcgagcgcctgctctgtggcttcatctgcagggttctgggcccagcagggctggggccaagttcaggggctgggaggtgttggacggtgggcaggggtggtcgggagtgccctgtgtgcctgggaggtccgtgaccactgtccgcctcagtccctctctgctggctcagggtctgcaggagtgtggtagtctgagcccctgcttggcagcccctctccaaccggtgccccagggagccacggcccagggcacttgggggccaggcctggtgaccaggaaagcagctgctggcacaagcgggaagggggctggtgggtgttttcctgtctgtcatctgcagtccttcagccccaggagagcaggcagcgaccctgctagtctccacaggccacagagctgcacacgcagtggctgaacacctgcagggtgagtacgagccgccggccaggcgtgctgggatcggggcagggcagctccagctgctgctcataggagtggagggggcggcagcagctgcagcgggcatccacctgctgggtgatgatgttgaagctgccgagaagtcaagacagagcagggtcatgactgctgcaggggcataaggcccctccctccccagggcagctgctccgcagaggcctggacctccccgctgagctcccgg

SEQ ID NO: 32 - DNA, 232348 bp, Homo sapiens
  source 1..232348: mol_type = genomic DNA
cagaatcacttcttcttaattgttgcttcccactattggcattggtgaaaggctgggccacaggaggctggatgaactttgtgttagccaggtaagcagaatgtctatgcaggtggaaagtagacagtgaaggtgtgctcatctgagtacggaggggcataggtcaggaacctcgttggcctgccctggcctttgcccctttgtttggccctgtggctacaaagctcccctaccaggagcagcccccactggcggctctggccctggaaacctgtgaatgtttggtgggggcagggtgtggagaggccaagtccacagtgtatctaaccctagtccatctcaggattcggcttcccccagccccttctccttagggtctcagctcgggccctcagggcagcaggaagatgcgctgtcctcactcccaagtccccctgcccttctgtgccttctgacctgggcagaacttcccatgccacagcttcgcctaatccagccacaggagaaaagaaaacgagggcaaatcaccacgatttggggggagggaggcccctgagcccccgctctgcccagacaaggcatcctgtgcatctcccatggctcatcacatctgcctgggactcagtgaaagggccagagggccaaaggtgacaccggagtctccagcacgaccttcgagggcctccagggcatttctcgcgctgtaggggcggaagactggctcccctggggatgcatgtgagtgtctaggagtgtacgctccccagggccccgcggaggtcagggttctctccatttaggacagcaaggagagaaagccctggagtgaggccctggggctgggggctaaagcagcacagagtatcagaaacggggtgctgggatggttaccggggaccgccagggaagacttgggagtccagcatgcgcctaggggagctgcggtggggaggcagcagggggcctcctctgccggatggggccttcggaggccgcgatccccgagagttcttcgctcgagggttcttcgctctagggtcccccattacagctgcgcggggccgagcaagcagggcgcggcggccggggcaaggtgcggagcctcgcgttcaccggctctacctgcggagcctcgcgttcactggctctacctgcgggaccagacccctgcagctccccagccagcacggccggggcacgcccgggaatctgtgtgctccccagggcccggggcgttcggggcgccgcgccttccagcgcctgggtcccagccccgatcccggagaccggcccggggggacccggggtcccgagtgcaccctcctgccctgcagactgtcccagcgccggggccagggggcgcaggacctcgcgcacgcccggcacggacgcatctttgtcttccctctcttcacggcgcgcgatctagccgggaatcgttttccggccccagtgtgcccggcgcgggtgaggcggaagcggccggggcgggggcgcaggcccggcagccgcaggccggtgcgggatgcgccccgcagccgcgccgcgtgcgcccggcagaggcggccctgcgtgccgtacgctgcgtccggggcgcgcccgccgctattcgggaagctattcagcttcccgggctcattagcagtcgcggtgtgcggctcggcgcgggctcacaaagagctcggcctcgcggactgagccggcggcagcggggcggggacggcggcgtacccgggcagcccagcgccctggccaggtaagctggggaacctgggctgcctgacttgccggcggcggcagcctggggccgcccggggcgccgcgaggacccggacgcgtggggggcggcgcggaggttgcggcccgagcgctccagagcgctgccctcccgactcagcgtggctgcggggcggccgccgctgggatatgggggtacagcccggcggccccactcctctctgaccggccgcttccccctcccacgacgggtgggcgggcggggcggggaccaggcggcggctctcgcatcccgcgcggggggcaccgcggcaaggggccacccggcgcggacaagaggcgctgtgtggcggggctgtccgctcgactcctgccgggctggccgggctgcttggcaccggcatcaagtccccgtgccgggcggcaactactgagtttggggtcgcctctgggttcgctgcccccagagaacccaagcccagatcttcgcccccttccctttccctttataataaggcccagaggggaaaacttatcaattcaaaaccccacaccccgttgctcctgggctgcaggtgcccggttgggggcacggcgcggacctgcccctcggcctggccccttccccatggcaggcactgcctggcaaggctgctggcgggagatctggctgcagatggtgaaggagaacatcgaggcccccggtccccaagcagggcgccatgggccgggcagcgggcctcggtgtgcccaggcggggagggggcgaacttcctttctccgacgcctgccgaggaccgccgtggagagcagagccttagaggggcctgctagtcttaacttcgtatttactggcagaaggaaggcttaatttttcagatctattcagatacgacctggcaggcaccagacataaatctgtggttgagtgcagtcagctcctaaatgggcatgtggagggtgaggcaccccgaactcggcatcttgcgtctggcactgtttttgggctaaactgcctctggcctcttcaacctcctgtgcctctttctgtttttgtttttgttttatttttctgttttccttcctctttgagaaaggacagtgattttagaaataatgacccgagagctttgcaggttgaagtgggacgagttttcctaaggtgcaggttggcaggtgccaggagcctgcaggtggctttttctcaggcctctgggtcagggtccctccaatgaggtgaggcaggggtttctcctgtgtgtcgccactacgcaggggacaggatctgggtttcccagtccagggcgtccaggatgccctgccctctgtgctgattcctgggtgaccgtgggggctgcttccccctgcagcctgggctggagagggtctcctgagcttaggatctgccaggcaggagggccagggtgacacggacctggaacgctggggctccaggcaatgtccagggcgtgagtgggtaaagctggagcttgtggctgtgtgccggcagccttccctcggtgggctctagcagcactgtcaggggggcccttggagtgggctccatggctgggctgggactgggtgatggcattagcgatggggcaccgagtcttccctcttatttattaggaagtgtggtctgtgcccctccctactgccggtctcctgggctcctgggatgggaggagctgcaggctgagtcccacggggtgtgagtgtgtgtgagcaggagagttgggtgggcgctggaaggaggtgaaactggtgaccgtcagctcctcattctcttccaccttgcatgttttctctgacaccctagactcaagttgtggcctgctagttaacttgtttacaaaacctttttaagtagttctaacctctttttttcaacaaaatgttagttttacaggcataattggtggggatggattgtgaaatggaggtgcataaatacctagtttgccaactgagctaagaaatactggataaaaataagagataattgtaaaagacactgatcacacccctggaagctgagaggggtgataagacaccttgatttttcctagacaaaactgaggaagtcagaggaaaaacagttgatggtgaggttggcatcaggctgggctttgtttggattgggcggcggtggctgtggtgagggctgttggagtggggagagtgggggttgagcctggcttcagagaccccctcgaggcctcagctcctctccggcgctcctggctgtcctctgccacgcatacctgccccggtgactcaacaggtgtgggcctcaggtgacaccatggtccgaagtcgtggagaaacctttactgtccaggggaggagaggactggcggtcggtggggatcgagacccagcacacatcactgggtggctcgaatgtcttcggcagagatcacatgccctgccttgcagcctggtccttagagaatggggagagtggagagagctctgggcctgggtggcgggcggtcctggctgtatcactcacaggctgcgtgccctccccatgcagtctcagttcctcacccttgccaggtggctgtgaggactgggaacgtggaggcacaggtaggatgtaaggtagccactgaccaccaggcaggcctccccgatgtaggtcaagtttgagatggttgctcaccaggaggcagcctgtgtgcccggtgggggctgggggtgaagtttgagagggttgctcaccaggaggcagcctgtgtgcccagcgggggctgggggtgctctttgttcccttgggtggtggttggcccgagtgcccacagggaggcttctctggctccttcgtttcccagagttcctccccaaccccctgccgcccaccgcctgggttgggtccagctcgtgtctcagagcagcctgctggcacaggctgagtcagctgtcgtgggcaccgtcttttctcgcctcccctgaagccaatcttcccctctctccctgtccagacacacaagggagccctgggaggtaggtgacctcaagatcatgcagccaggctcactctgtggaaccctacgtactggtggggtgccactgctgtgtgcattgtgatttctgtgctggctgtgaggtttcccaggttgggggctgtggggtactcctgactctgcaagttggcccaggccaggtgtgtcaccattgcccaggccttcagtggctttccagtgctccctccacatccacgttactcggctggattttctcaagttcccccacttgctcccaagaatggcccctccaggctgccctggctccaggcagacaggcttactgcccagatctgccctgggttgtccccaccccatccccacctgtcatcttggcgcatgtccatcctggagatcccaactgaatgtgggctctttccctcttattccttggtcctcagatttgtcaggccactcttgcctcagggcctttgcacctgctgttcccacccccttggcatgagccacccccagatgctcacatggctggcccctcacttattgcccactccctgaaagccctacataaattggctttgttaaccttgctttgtgtttctcttgttaaccttgctttgtgtttctccttagtactcaccattcagtgtgttatttatttacttgtttgtttattgtcagtctcttaccactcaattgtaaaagactttgttcacctctggatccccagtagctagaaaagtgcctggcacacagcagagccttagcgctgttgttggatgagtgagtgaacgaaacacgggagcagtagtctccttgcagcacatgtcctgctccctgtgcctccttttcccgcgtcccagagctggaacctagctgtgttcacatttggatcctcctggcatgtagcacagaccctcactcagtgggcagtcaggaaagagctgtagaattgtacagtgcaacgtcagtttcacataggccagaggagaatgtgtttgggaaggtaagcagcccaaagagtgagctttctgattctgcactaagattcctttttggattttcagttgtttgggttctctgcacccaggcggtccctgctgccaaagtcagctctgtgtctccctgcagtcacctcggatgtggatgcactttggaaggaggcacccccacgcccagattcccttcccactccatctggatctttccaaacttgtcttgtatgtaatgtcagactctgtcccagggctcccagccactctgctttaccttccagaagcctccgcctgcctgactgtctcttgcctgtgtcctggcctagttggaggagatgctttagttttatgagaaagggactgggaggttggaaaagaggatgggatttggagtaacaggagctcagttccagcctggccctgccactaatccctggggcccagggccagtcacctggcttgagagtctttctcagcatctgcaatacacgcacgaggcctcttgcctgcggttgttttgaggcacaaatgagatgcaatatttaactgatgcaagatattttatgacagcaagtcatttggtgtggccacgtagccttgggcctgtgtggcttctcttactgtcctgagagttttaagggtcaggtttgtgagttacagctacggcctagtgagagaatgcagaggaggcacgtcataaactctaaggggctgttttaatataaggtgctatgtctgttgttttgtgtttcaaggatcaaagttaagagaaaaaaaatatgtggttgaacttcctgcattgagtgactgaaaatattttcatctctagttttctggaaacggaaacactccaacatttgaagatggttttgatggcgaaaccactggaatgaaatgcacatcattgggcaattctgtgtgttgagtttcatccttctttgtttgtcattttaaataatttcccgacaaatctggaaggcacgtcttgtcttaactttgcaacaaggaggctggggacaggtagctgagctgtgggttgcctaagaacactctgctgtgacggggcagtgctggcctttgagcctgagctggagagagtgtgaggcccatgttttctccctgtctcctgctggggcccattttgtatcagatttgtttttcacggggtgggcatgactaggactcgtgaccactggtgggcaagtacagaggctaattttcaacacgtgccgagagactgatggctggcatcagagagtcatggaaatgccacagatgacatgggcccttcacagggatggggagagggtctgggagcttgccctccaggaaggtggctgacatggttggtgggacatgaaggtgttttccgttttgcacttgaagccaacatggattcttagcacttgttgtccctagaatcaactgcgcagagagatgcttggttctgaaactctcaggcaaggacagttctgaggaaactctcattagtaaatagtgagtcggagaacactattgacatttggcattttcagttgagatatatgtgtacagtcatgcgtcacatgacagtgttttggggaatgatagcatatatgacagaggtcccataagattattatggagctgaaaaattcctattgcttagtgacattgtcgtaaagttgtagtgcagttactttattttttaaaaaaatttaatgtagcctaagtgtacaatatttataaagtctacgctagtgtacagatggactcacccagagaaatttccagtcttgcaagctccattcatggttagtgtcctagatggggtactgtgttatatataatatatatatatgtttttttgagacggagtctcgccctgtcacccaggctggagtgcagtggctcaatctcagctcacggcaagctctgcctcacgggttcatgccattctcctgcctcagcctaccgagtagctgggactacaggcacctgccaccacgcctggttaatttttttggatttttagtagagacggggtttcactgtgttagccaagatggtctcgacctcctgacctcatgatccgcccacctcggcctcccaaggtgctgggattacaggcgtgagccaccacgcctggcccatgttttatcttttataccatatttttactgtgccttttctatgtttagatagatacttgtgttacagttgcccacagtattcagcgtggtaacatgctgcccaggtgtgtagcctgggagcaatggcctgtaacctatagccaaggtgtggagtaggtttgtataaagtatgctctatgatgtttgcacaatgatgaaattgcctaatgacaaatttctcagaacacatccctgccattaagcgatgcataactgtgtgtatatgtgtgtgtgtgtgtgtgtatgtgtacgtatatatgtgtgtatgtatgtgtatatatatataaaattttttttatttggttggttttacattcctggaattgactctccagcagggcagctgtaaatatgaattcctccgaactgttgtatgcattgttaatttagtaaagtacagtttatggtttcccaccgttggtttaattgtcaactgtcttggaaaaatccattgttgcaaaaacaggaaaaccactaattgagtgaatgcgtgcatttagggatgatggatttctcaggtctctctggaagcaagtgtgtgccttgtgcaaataaaacatagtttctgtttctcagtcttttgctgtaataagtgagccatgtgctctagcatctgtctggattatccggagctggtggcagctgtcacgggtgtggtgcagtggggccaggcatgtgttaggaactggaagctctgggaagccaggctttgcctccacgtgtgagccagctgtagagcgtcactgctcagagtttgtcttgactcatcctgagaagggcacgtggagatctgtgtcccattcctcaccagccactgagttactatggatggaggagatgagatgtgtgcaactgttctgctacagtaaagcactcagtcagtgcagtcaccaggtttagggtgtgtgtgtgttttaccaacttgcctgctgggtttcagacacctggcactacctccagcctcttactgattctggctagtacttgtgaaagccgtcagctgggtgatgaatggaccgattttggccgcaggtccctgcacttcccatctggcctgactgctagattctgagcccctgaggcaggactgagtgggtcacattaatggctgattgtctcgggaatggcattgggtgaagtcgaggttttcctgacccacagctcctagtagaagtgcctttcttttgtgcatgtattgtgaagattctgcctgtgaactttctctaccctttgagtcctaaggttcaggtacttggagaggagcgtgtcatcgttttgcaggttggatgtgcggttgttggggaagacatctttgtgctgtgttgggttggaagctttgagagcagaagcccctccagaccaagaactcctgattatgtctctcccttgggctttcgcagttttcagcttctaaattaattgcattttattaagtaatggttttcttcttgatcacaggcgtgcctgtgcttaatcagcactgacgactggtgctgcttcagttgatttgatacacctagaggcagcctcatctccaacttgccttgacttcgtctggggagctgccgtgggggacccctggactggcagcattcccacccctcactttggcaaccctggtctaactccgtacgtgttactccttttatctgtcacatagggtggcttaatctaatagtggaaacaaaggggtgcgggacactaacatggtaggtctcaccttgcctgtcattcacctctcagtcctttgacactcaaggactctgcagtggtagaaccgggggcaggtacccttcacttttcttacccccgagtccctttgcctggagctctgtccatccatccacccatctactcagtaggtattttctgagcagctactgtattccagctttcttgttcccagtttagagctgggtgggatcaggagggagggcatggagggggctgctggagaatgtgcagtggcatcagagccccattctggctctgggtccaaggccctcctagagaggcacagtctggcagatgtgagagccccatggtaggttggggtggatcatggaccccatcctataagagtgggtgggtttaccccttcagagcccaggccagaagagccctccaggcaaagggccagcctggaatggggcaccctgggcacaggggggactatgtggtttgtgtaggttagagctggagatgggggttggagggcagttgctgacgattaggagcttggtggccctagagagtccttgctgtgggttgggagcgaagcagatgggccaataacaacgcatagtttaccaagcgaactctaggagagtgatttctgcagctggcttccctagcagacaggtcagagcgtgggagaaggacgccgttaggggcatgttcaggggtgcatctagaggcgaggggagggtgcggggaggtgctggtggaagatgcactgcatggggtggggaggggctcagtaagaacacaggagggtggcgggggcaggtgtctggccaaggcagctcctgcgtcattggggggctccagagcccgctccctatgttctgtaggaggcggctgctgctgccaagtcccagccttgctagtgaggacgtttaattttaccctttagagatttacaggatttctagattaacttgcccctgtttttctaaaagaacgacaaaatccatgacaaaccgttcatcacattattaactggctcacccagccttaacctgtgcagctccgccaacttaccctcggcacacagggaggcctgggtccccaggcagctccagtgtgcaggggtgtgggtgacagcgcaggtgtggcctccctgctgctggcctccggtggctggcctcagcctggctgggcacgcaggctgtccttacggggctcccagtagctttctggtcctgcgtcaggagaggggactgcacagggcttgggaaagagagcgggagcagcagtgccgcaggatgatgggctccagaggcctctgcagcaggggtactctggggagacattcgggtgcctcctgtccatggcctcgatgtgccagggcgcctgcagcttggaccctcttcccctttcaggcggagggagctgttcatcctctgggggctgctgggccagaaatatctcttacctgataatgtcaggcatcagaggttcctgtttcgtgggtaagttgctgtatgttttggggctgcagtcagtctgtttttctcactggcatggcatgggggtggggggcagtattccctcccatgaggcccatgtccacctcattatctctgtctgctgggactgcgctggatgctggctgaggctgcctttgttactttcatgcgccataactggaaaggcctgctgcttgttaggctccttagaattctgatttgaaggctgggcatggtggttcatgaggtaatcccagcactttgggaagccgaggagggaggctcgcttaagcccaggagtttgagaccagcctgggtaacgtaaggagaccccatctctacaaaaaaatagaaaagttagtcggatgtggtggctcacgtgtgtggtcctagctactcgggaggctgaggtgggaggatcccttaagcccaggaagttgaggctgcagtgagctgtgactgcgtcactctactccaacctgggtgacagtgagaacctgtctcaaaaaaaatatctgatttgaaggagagggagctctatttgatgcgggggttgggggtggagagcacctctgtgagtagacctttctgtcatcttgatggttttaatcagatatctaatattatattagtagttcacgtcaactgatgtcccaaacccactttcttctcttctcttctcttctcttttgagacagagtctcattctgtcgcccagactggagtgcagtggcacgatctcagctcactgcaagctccgcctcccgggttcacgccattctcctgcctcagcctccccagcagctgggactacaggcgcccgccaccacccccggctaattttttgtatttttagtagagacagggtttcaccgtgttagccaggatggtcttgatctgctgacctcatgattcgcccacatcggcctcccaaagtgctgggattacaggcatgagccaccgcgcctggcctctttctttattgtgatgtagagaaaccaaactctggtgtatttaatccattgtgtttcacagcagggatcactgcctggctcgcctgtcatggtgtgggggcagtgcctgattctggagatgggctatcattgtgctgactgggtcagcagtggctgctcccaaaaagtcccataaaacccacccatatttgtagaaatccaaatagagtttacttcccagtggtcacccttttaaatacaattagatttagtttcaaggaagtaactggagttataatacattaatttgggactgatttttgtcccacccatccagtccctgacagtggtccccaaactctcaatcatgttccttattggaaccttccaggctggcataggcttagggtccattacgggtgttcaaggtccagaattcatgtcacctgattgcttggacacaactggacctcacatctccggccctgacaccagaaactaggcctccatctgccagtgtcttagtggaatctattttagcaaatgactcatcttaaaataatgcactatgtaatcaacaagaaaatgagagaacacccagtaggaaaatggcaaaagacacgacacacacacacacacacacacacacacacgtccactaaagagatgaaaaagtactccactccattagtcatcagggagatgcaaaatgaattgtaaatgggacaccattccacacccaccagaatggctaacatcaaaagagcagaaaaagctgggtgcagtggctcaatgcttgtaatcccagcactttgtgaagctgaggcgggtggatcacctgaggccaggagtttgagaccaacatgaccaacatggtgaaaccctttctctactgaaaatacaaaacaattaggtgggcatggtggcgggcgcctataaccccagctactcgggaggttgaggtgggagaatcacctgaacccgggaggtggaggttgcagtgagccgagattgcaccactgcactccagcctgggcaacagagcgagattccgtctcaaaaaaaaaaaaaaaaaaaagagaaaaagagcagaaaatagcaggtgtcggtgaggatgtggaacaaatggacctctgattgttggtcagagtagacattcgtacaactgctttgggaagcttttttgtagaattaactaaagccaagcttacatatactctatgaccagcagtctcaatccaaatgaaatggagtgaaatgggcatatgggcattagtgaccttcaaatgacatcaggttctaatccctgaaacctgtgaatgttactttatgtggtagtggttttgcagatgtgtttaaggattttgtaatgaagagattgtcttgaattatctgggtgggccctaaatgccatcctcaaggatcgtataagagagaggcagagagagatgtgaccaaggaggcggaaattggagtgatgcggccacagctcagggagcaccggcagctgggagaaactggacagggccaggtaaaggattctcccctggtgcctctggagggaatgtggccctgccaacagcttgatttcagcccagtgaaactgcatgtagacttctagcctccagaactgcgagagaagaaatgtgttttcagccacccagttttgtggtcatttgtcacagcaaccgttggaaatggatacagccatcaagagacacacaaaagtgtccatagcagcgtgatggtaactgccaaagtgcaaagaaaccagatggccatcagcagcagaatagatcagtaccccgagggtcttctcacagggcacactgtacggcaggccgagaatgagcactctgcaaatgtggcagctgtgtggatggggcttgccacgtaacgttgagcaaaaaaccccagatgctagagtgtgtaatgcatgattctgtgtctaggaagggcaacagacaactgtcatgtgtggaaatcaggttgccttcgggagatggtactgataggaggcccagggggagggaagcacagcttttggaggtgctgatgatgtcccctttccccatcttggtttgcatgggaaggttccatttatgctatggaacttttctgtatgtatatatttcaagaaaaagtataaaaacagagcagttcatgatcttggagttttcaaggtgaaatttgaatggaatgagtcatggcttcttctactgctagaacaatactatcaaaattgagattatacttaatgtgagataattagattttgccattacaacaaatgctactaaatattcagatgcacactatattttctaagtgagatcagggtatgtaaacccgagtaggacgctaagatgtatatagatttaattggtgtggataagttatctgcaggaaatgtatttttatttctgcatataaaagaagctgtgcttttaaagaaaactagacacaagtaaccaaatgtttaagtatcaaacgttatgtggttgcagttgagagggaaaccaaagagctttaagaagagcagtcggggggagatgtggcgcatggagaactcatcgggggcagccccatgtcctcgcagcccagaagtcctgggtggaggttctatggcaccacctggctacctgcctccccaggcaagggcccaacccctcaggtccccagaggcgccccatctcctttgcctacgtctctccccacctgccttccctgcctcatctacctgtgaacttctcattcctctggactctactttgccccttccgggttgcccccagagctcttgttctggctgtgagcccaccaggatagggccatgtcgctgacttcagaggagagagactctttgtctgacgactgttgacctcgtaaccactcagcttcatgggccacagtgtgcttgagtgagcacagccatggcgtgggttcacctgaggcttcgtggaagccgtgttgcgttgcagccggttggaggcttccgtatgctcagggcgtcgtgtgtgcccggccttgctctgcacagctcatctgtgcatgtgagctcacttcctcctcagcctcccacagaggcactgggagaccttggactggacacgcgtgcaggcctggtcatggcattcctgcaagcgtgctatctgcgggctgtttccgattcacagggcaaagggtgtagatatgcagaatgagcatgtagggaccttcgtggtcgcctctgtgtgttggatcggataataaagtgaggaatgtctttaaaaaaaattcatttaggtagtaatttagttttattttattttgcaaaagtacagatctgtaatatactatgaaaaaaccagtctttcccccaagatgctttgcgacacagtggtgtgaagtgtgggagagtgtgtcgggagagatgaggaggcagggcaggagtggagggtcggagagcaggaggtgagggacccctgggggagaggacctcaatgttgtgtcagttcctttctaggtgaggagttggagccccagacagggggactgggccgtggtcacgggtggcagaagcagagcctttgtttgcaccagaccttgaccctgcgccccgtgggtcctcccaacccttcttcccagcctcctccgcctggactcaggcttcttcgggctcatcagacctgaacagcctggcagtgtggctgtgtgggaatgggtgacaggtgctgttctccccagtgcaaatcaccaatgctgggcaccgtgcatcagcgtcgtggtgacggcagcattgggtggatcttcagggaatgtcgcttgtgccctctcgggctctgagggtcccacatgacagagaccagcatctactgccctggccactcactcaggtcactttatgcttggtgacacatcacagttgctcaaactgaagcctccctgtggctttgtcatcttctttccagccaagggggctgtcccgacagactctccccatcaccttggcattttactactgtggtgtgtttggtgacatttgtaaatgtggtgattttttttgctgtgccctttgttgctgtggctgcttctacaaatgttaggataagctgtcgggggccgcttccctgcgttttgagccctttagcctgggcggcgcccctgtgtgtcctgtttccctgtcaggatgtcctgtcccatctgcagcctcttcaccctgcagggacttctcttgtgtctctgtcctgtggctgactggctgcctggcagagaggcaggcactcactcatttgctcaccccttcacccaggtcctccttgtaatatgtattgtaaattgtatatttacaacttacccttgtccacatgcatgcggcccactgccctgcccctggctggggctgacccctggatcccagcacctggcacagcacctggaactcggtagctgctccaggaaagtggtcaaatggtttcaacagctccacaccccgtcccatgtcagagagactagagtaccaagcccagcactgttccggtggtcatttccagggatgtgcgtgaagcaagctggtgtcatgtgatgcggtcactctagaacctcagaaagattttgtgtcttcagccatactgcaggcacgcttggctctgtccggtgcttggggagcacagtggcttcatcagccatcaccgtggcctgaggatctgaaagggtgtctgaggggtgggcctggtggtgctgcccctacccccagcccccacccagctctggggtttggggttgtctgagccccgccccaccctcccagatccagtgggagccagcgtggcacggcagggccctgtggcttgggccaggctctctctatggtctcctggctggcatttgcactatggaaagcccctcttcctatgggcctgtccttgccttcagcacagctgggatttggggtgggttttcagtatgtggtgctgtgtgtggttcagaagcacagacgcatgacttctctgtgccctggatgctttccagctgcatctcccatgttcttggttggggggtggcgctttgtttattgcacctgggggagggttgagtggtcctggatgcagccccttctcatctccctgtgccgtggccacacccctgactgtttttgccctggatgattgatgtgggagctggactgtggccagagactctccctgcccatgttggcctgtggactgctgcctggccaccctgcggggttagggacgtctcaggagtgagcattccagtgtttgcagtgccgagggcatcatgccagattctggcacacacacaaaccagcatcgggaagcctggaccctgccctcggggagcttttgatgtgtgtgtgtgtgtgtgtgtgtgtgtgtgtgtatgttgggggtctggggtgggggaggggaagaataaagggccagatggggctccagcgaggtatggcaacaggagggaagattcaggcctgagtgaagcaggcatcacagatgggggctcataaaaacccgaaggtaaaggggggtgcatttccatcctcgctcctccaatgtgggctgcacacagtgacctctgtccacagagcccagtgcagaaaggggaagcagaaacccaacacacaccgcctcagcctgggggccacagttggcgccaacagcaagtcatgtgggtggcacatgccctgggtgctgtggagggaggagggcactttccttctgtatccgtcctcccccaaatccgttaccactacgtaattatgaggaaaactccagacaaattccagttgaggggcattctacaaaataccttgccaatgctcttcaaaatatcaagtccatcaaaactaaggacactctgagatgctgtcacagccaagaggagggccctcttcccctttcaggtggagggagcctgaggagacgcgacagctgaacatgatgtgctgtcctgcaggaggtcccggagcagaaagagggcgctagggagaagctatggaaatgccaatgaagtatggactgtagttaataatggtggatcgagattcattaattgtgattcatgtgctgtgctgatgtatggcgatgttaataatcatggaaggtggctgtgggtatatgagaactctgtggagtctgctcagtttttctgtaagtctagaactgttctaaaaatgaagtctattaattgttggaaggcagattgtgtccctccaccatgtccctggtggtgggaccttggctccaaacctcactgttcccccatctgtctcaggaccctcacctttgtcatccttttcggttcctctttactgttcccatgaaaactggggggtaagctcatgttagtatttagaatatgtatgttttagtgccccaagtttctgggtgcttgaaaatgaccggtttctcagatgcagcctgcctgggtgctgggggccatccctgggagagagagaagcccagtgacttgagcttggaagattttgaaaacaaaacatcaaagcctggtttgctgacgtcctgtggcccagttcactttctgtggtgccggccaggttccatgggtctgatgatgccggcagcagtgtccctggcctctggctttatcttatgttcactagaaaagaagaatatgtcctgtgatacttgatcccctgatcagcccctgggctcacttatagtcagtgacagaggccatgtttttttggggggtgatattggtcacgatagacgatagtgaccaaagctgttgtaagtgcggttgaccgtccagtgaggaggcaaaagagagccaacatcttcatgaactgggctggcacctgagcatttatggccatggcctagctgagtagctggtcgatccactttgttcctgcagaaagggtggcctgctggggacacagaaaaacagccctggccactgaaatggccatttcagcttcaagttacataagcgtcagcgcctgtatttgtggtggaggcccaggatgaaatgaaatattgcccagggagggcagagctgcagtcctgtaaatgggcggggaccccgtggtcttgtggagtcagcagggacagctgcggtttagtggagagtcagaggggccttcctgggaccccactgcctccctacagtccagcttgcggctggcaatgacatccactttgcaagatgatgtgagtcatgacagagccaggacctggcacaggggaggtgctgggtgagggacaggcagtgctctgtggtgggccagtggtgggaaggacccttctggaaggcggaagacctacactgccggggccctgggcaagtcacagcctcctcacttgtccctgaggagggacaaggacaagtcagaggaagtgattcctacgggtcttaccactcatccggattttgtgacaaaattaggttgaaccatatgaaactgttatttctgtatgtcaaaaagtgatccaatataggcaacttcatatgcctcaactcagcagtttagcattacagcgatttttggcaagagagaacacttttatttaaaaaacattatttttagttatcacatatgaattcattcattgtattggaaaacagagatagcagaaagcgaaaggaggaagctttgagataccagactccacccgccgggggccctcctgttgtttgcccacgattcctccctgttcctgggcaccccggctcccagcattccttctcctggacggtatatgaggagcactttccacactcatggacggtttcttccacacccagccatacgagtttgtcctttctggagctggatcccagggttggacattaaatttgtttagaatgtttttctgctatgaatgaatgctgtaataaatatccttgtagttgtgttttttgttttttattggcagatattcatgatcccttactataaatttacaagagtagaattgctgggcaaaatgttaaggcttttgattgacatctggaaaggttttattacccactgacagtgagagtgaggggttgccctcccctcttccttccttttccctcttcccttccacccatttgatggtacaccattgagcagcatccagcaaacagtgttggtggctcccctcgttatctgcagcacgcagactccctgtgtccagcaaacagcgttgcagcacccctcagtgtctgcagcacgcagactccctgtgacccagcttcctaggctggctggtggtgtttggagaggaaatcaagaacgtgtggggaagcccgtggagaattttagagacttcccatgacacacgaggcagtgggagtggggctggagagagactgttagttattccagggagagaggccttttctgattgtcccactcaccagcacactgaggggctgggccgctgacctgatgggttggggaccagagccctggcttatgtgcagttgtttcttttgaacatgtcttattttgctggtgatctggcaagtaggttgaaaccaagccctcccccagttcctcaaccgcctgggactgcacaggtgcctgggagtctgatggctggcaggctgccttttgaagcttggcctggtgtcccggagctgttggttgccctaggaatccaaggaaaagctgctgaattctgcggccccaggaggatctttgtcctccttttgcagaagcaataggtggatttgctctgttgagctggaaggaggaatttttagatttcctctggctgaagaagttaaaatggaaccatctacatcaattccccgcaattggactttgaagcaagctttcggaagaacggacttgactattttctatgcgtggaagcaaattccttgggaacttctggtgaattttaaagtgcttgtctattttgtttcattctccaatactgagaagtctttaataactagaggctgcctgggtaggtcaaggtctgaggggcagcactccccaccagagctagtcattaaatagatctgccatctgtagtttttgttttgcattttgagatggaggtgttgctatgttgtctctaggctggacttgaactcttgggctcaggcaatcctcccgcctcagtctcctgagtagctgggactacaggtacatgccaccgcacctggcttgatatctctgttttaaaaatgctgtcttctagcaattatcttgtatctctggaggagaaaggtgccatttttctggcagtggaatttggggctgagaaggaccctggctccatcaatgggggctggcgtctaacatgctagattttaagatcctttaaatattttttctgattatgaaattaaaatgtactaattataagggctcgaactttacagaaatgcatcatgtagaatagaaaatgaaagcttccccccaagtttcaccactgccccattcagtgcccacaaggataatcattattcacaatttggtggagactcctcccattttttttttctgtctgtggaaatattttacttgtcttttacacaaatacatgttttaaaagtatttttcaacaaaatgagatcctattgtaaataagatttgcagttcgatcccccagccgtgtgtcttagccatgatcccttgtccgttgtgcatagcagcattattcttttttaaaaaaaatttactttaagttctggaatacacctgcagaatgtatgatagactagataaagaaagtgtggcacatatacaccatggaatactatgcagccataagaaagaatgagttcatgtcctttggagggacttggataaagctggaagcagcattattctctctgacacttgcacaatatgtgaccgtttacttattgaacttttgggttgttaccatttttctcacttatggaaaatgctgacatgtggagtctcgtacattaaactcttgtgtctgcatggggttgtttccgtagcataggttcctagaagtggacttgctgggctgaatggtttgggcattcagagtgtcaacagatattgccaagttgctctctggacaggtggtgaccattttaaatgatgctggtgtgtggggcagcggtgtccccactgacactctctggacatcgacactctctggacatgatcagtctttgtggtttcattcagtcatgtgggtataaagtgatagcttatttcattttgtatttgtaaaaattgtgaatgacaacaagctgcttcttgtgtgcttaatactaatttgaatttctccttctaattctctttttcatccttgcctcttttcctcttgacttgtgaaggttttttttgttgttgatttataggtgttcttggtacatagggttattcctcatttgctatatatattgcagatatttttttctcagatgccacttgtcctttgattttatttaaagacatatttggcaatgcaaaaatttggaagttttacattgttaaatctatcaagcttgctttatttaccctgagttttgtatcttacttagagaaagggtttctctaccctaatatatataagcaccctcctgcatgttctgctaatacttgatagtccagatttttctacatttacatctcttattcaatctaaaatgtattttagatgtagtgtgagttggggatgtagtttttttataggagtattcagttttccagcctaatttcctagtcagccactttgacctctctcttttggcagatttgtcatgggttaagttgctgctgtgttctgagtgtttctcctgtgtttctggattctccattctaatttactgctttattcttgtgccgatatctaccgtacaagttactgtggcttttggtaagactttgttatcttaaagggccattacctcttcattcctcttcttttttcattttccccctaacctttcttctatattcctttgactagaatcatcctttcagcaggagccaggcagagcagctgtccgtgggctccccagttggccagagctgttggccaggatgtggaaggaatcaggcgggagcccccagcgggatggtcattgcggtgtctctgcacctaagtgatttgtttttgcagacatcaatgctcaggattgatcaacctcaggatcaatgcttgggaagtgtagagcttgcgtcccatcatagatatgactccgaatctgtggggactctccctgggctgactcataaaatgaatgggcacctgagccactctgtgtgatgctgaaaaccaggagcgcttgggcgaccctttcagccataaagtctgcctttccccaggggagtggctgctgctggtgtattttctatttgaaccaacttaaaggggcctgcccaagtttcagaaagaaactcaggttcttgacatatacagggggaaccctttcgtttctaaaatctgtttaaaaaccttaatgttatttaaaaatccactttaccattggtgaaaatatcctcttacgcatttgcagtgcacctctgtcctctgtgaagtaccccgtgagtgcaggcctgtgcccgtgacctggctggaccctggggttttcccgagccgttgtccctgagctgtttgtggtgtagacaggcagccctgtgggcctggataagaggttttgcatgctccttacagttcaaagcaggcgtgggccatcttccctgactcctgccttgtcctccaatagtaagtcacgcccctgtcactccctgatggagccactccactgaggttattgttgtttttgtttgttttgttttcttgtttttttttttttgagacagagtcttgctctgtcgcccaggctggagtacagtggcgcaatctcggctcactgcaagctccgcctcccaggttcacgccattctcctgcctcagcctcccaagtacctgggactacaggcgcccgccaccatgcccagctaattttttgtatttttagtggagatggggtttcaccatgttagccagatggtctcgatctcctgacctcgtgatccacccgcctccgcctgtcaaagtgctgggattacaggcgtgagccactgcaccaggcccactgaggttattgttgattttacactggggcttttctttgggatacctcaggctcctggttatgcaatagaggaaacattctgagagaatcggctggtgagatgcctgacaccgctctcctggcatctgacatcaaggatatcttaatatttctagtttttaaaaattgtgataaataacacataacatgacatttaccacctgaaatacttttaagtatatgattctatggcattaaatacactcagtgttgtgcaaccatcaccgtcatccatctccagaactttcttcatcttgcaatctgaaattctgtgtccattaaacactaactcctccttccacctcccccagcccccggcagccaccattttacttccttttttttttttttttttgagacactgtcttgctctgttgcccaggctggagtgcagtggtgcaatctcggctcacagcaagctccgcctgctaggttcacgccattctcctacctcagcctcccaagtagctggggctacaggcgcccgccaccatgcctggctaattttttttttgtatttttagtagagatggggtttcaccgtgttagccaggatggtctcaatctcctgacctcgtgatccgcccgcctcggcctcccaaagtgctgggattacaggcttgagccaccgcgcccagcaaccaccattctacattctgtctctgtgaatttgacgattccaggtgccgcatgtgagtggaatcatacaatcatttatctttttccaactggcttctttcacttcgcgtgacgccctcaaggcccatctgtgttgtagcatgcgtcagaacttccttccttcttagggctgactactgcccccattgtatggatagaccatgttttgtttgtggttcatccctcagacatcgagaatatctcacacagtagaaagaatccaagaagccaatgaggacttgatcttggtcgcctctgtgagggttgggtggacaggccaaagctacctactcatcctgcatcgagctggatgctgggcacaggtgctgggcacaggtgctgggcacagaggatgcaaactggagcaggagccagttcctgcccccaaagtgcagcagcaacatgccacgttagtgccagcctatccggggctttgtaaagctaagaaaagagcctgtatccatcctgaaggccgtgtgaccacagggcttctaaaggatgcttctgtgttcccagagttaggtggaagctcttagaaggatctcttttatcccagtgctcttgctaagaatggaaagcccctctgcgtgactgcagtagctggtgcgatcctctggtcacttgtaccagagccggggaggtcgtggcttgcaaaactcacctctcataatgggatgccaataaatattatccgaagttggtatacccagaaagagagtttaaacattatttagagaggtggaaaacagccaccggtagaattaaaatcagaaataatgacaaggatggccagcggagtggggaagtccagattggggaatgtgatgtttcattataagcactttcagcatttgcttactttggtctgagtaaaagaattgtctcctttttttagggccatgtacagcaaaggactgaccatctgtcagacatgctggtcagttttcctggcaaagcagggttggaggtttctgtcctcaggtgggtgggcagggacggcagcttgccgtaaggtatccaacagcaccaggggcaggaaatgaaaagtgctcagtgattggtgggataatggtatctagcacaatgattcctgccaaaatcttaatggtgtgcaataaatgaaaatgctgccccagtcagatgggaccagcatttttcagcaactttcaaggtcttgtgtcacaggaatgaagatccgagtatttcccacccatggagggggtggtgaaggagttttcagtcctgggcaccctgggctgtgccgaaagtctctgcgtcacaccgcctgggttagttgggaaagagagctcccaccgttctcttttaacccttgtccttttgtaccacagcaattgctttcctggagatcagaaccatgtctgggcttaacatcatctttggaaatcctaaaaggcaatgaagagatttttctcttttcatttctttttgatacagccgtgtcagtttgaaattttattttcatatcagttctaatagtgtgtctgcttgacatagtttctgttaaatgggcttgatatgaagttatttaaaaattcaaatatttagagtttcagggcccatcgtcttgatttttggggcagtacctcaatttcatacggtgttattcttttccagagagatgggtcactgaataatttacattttatggttgttttgtgagaaactatttctggttataaatagtaaacatcttctaggttttgcagtaagaaataatggattttgttagaaaaaagaaccataagaagatgtgattttaattttgactattttgacttcctgtaagtaccttctggagcagaaggttttctcttcgtggattctgcatcttggatttggggactctgttgcactgagctgtgctctgtggggaggagcctgtggcagaacagtttgggttctgctggccacctttcactctattcagtgaggctgggtcccagagaaagatgacagcggttaggtcttgttgggaagaaaactcggctaccaaccctggaccattttgcttcccctgaacaaataagatagtcatttgcctgcttttggggacggagcctgtggtttgcacagggtgaacgaggtggcagctggcttgcctgctggcctgcttcgtggagataagatgctcagacccaccgctgctcttcaggggttgtggagggaattaatgcacttccttttgtcccccaatctcatttacatgtctctggagctgagcatgtgttctttttctttgttcatctcaatagagcttttaaattaaatagatgttgcttaagccattcagaaatgtttcacattttaaaaaacaaaaggtagttgctgccatgattcctttgccacccctacaccgtggccttgtaggacagtccccccttggctgtgctgagcccatctggaagtgtttctgattctaatcagaagtggaacagtttcagtgcagattataggtttatgttagctttagtgatggagggatggaaatagatgcttcctcgctattaccattccaagtaaaataatgaggctgcatatttgcagtgagctgctgaagccagacgtcactagagtaatttggattagtgggaagttggaacatattgttttaaaagcgatttcaagagcatcatcttcggaaatcctatatagcaatgaagtgattttttttcactttttcatttttatttatgttgctgtatctgtttgaatttttagtttcatatcagttccctctaatagcatacgtgcttgagatattttgacttctattaaatgggcttaatatgaaattatattaaataatttttattgctatttggaaggccaggaagtgtttccagttttcatattttgggtcatggagatgctacttcccatccattttgtgacatgtaagagtcaggccatttcaaggaagggccagaggagagactttgtgtttctgggaatatactatggattaggacatgtgggttattcaaagatctatccttttgtgctttgaaatctgaaatgtagaaactgtggcctcactgaggaggagttttagaatatgcaagggagatgatcaggactggatcttgtatttgggtaccacatccagtcccagacagcattgctaaggcaaggagctcataaaagccccaagctctagctgttggctacttatctcctggagcatcagggtgagcgcggttcaggctggggagtcctgatggctgcctggttgttacaggatgttacagcttaggcctggggacatagcccagcaccctccagaggttgtgtctgttctttactcttcaggttccctggaggcaggagaggagctggcctcatttctggcaggcaccccactactgttattgagcaatcctccaggctgcagagatgtcagaggaggaccctaatgtctcctgattttgattattttgttctttttccctaggtgttttacttgcagataccttgagtaccttgtttgtatattcactttgaaagcacacatttaaatgtttataaggaaaaggttctaaagacatccattgatccattcattcatcattcagcaaatacctgttgaatacctgctgtgtgctaggcactgcggtgggcgagccagagggctttgttgctccaaggagcttgcattctagtattctagttattttcacgcatctgcactatctgggacagggaccattgcgttttgtcgtatataaagcagcatgtgtctgcactacagtttgtgtccgtcgcagatgggcaaggattgagtgcaaaaacttctgggccaaaaggggttggcttgggtcaggctgctcagtagctgaggtgaaagcatgtgccacccctcctgatacagggatccttgctgattgtgtgtgacaccagggccttcccatctgtcagctgggtttgtcctcacagtagctcgaggagcaggcggggcagcatctggaggcctggtgccctttcacaccttgctgcgaccaccaggctgctcagcagtggcccgtgcccaccactgcacctgccgccttgttccagctccgggacctgtcaggccacagtactacctcctgtcccttcccccaggatcctagggtctctgacttcaatcctctgggcccaggtttgcaagccactccctgggaagctgtcctgggatctgtgcctgtctacttcctgtagtccaccaccaggaggtagaaagggacagtctgctgacctccagtctttccacagcagtgtctgaatggattcaggaaatccttggcggtgccccaggatgtgctggtgctggcttaggggttggtgccatagcagcacatgagacaaggggagcccccacttgtgggtctcaccgtctttagaacgttagcacttatttaaattaaaaaaaattctactagttgtagcttacagtcaccgagtttctttcattgtattcggtgactttgaagccagtttggtagattctatttcatgaatagtccttgctctggtctgacatctgggtcagtgagtagcttcggcccctccctagagcctcctgtcctgggctgcagtgacaggctgcgggccagtggggtacactcacgcacacccctctaggaacactggggccctggataattatgccaactgcaggctatttctccctccaagtggaagtccttgaggtgaaacattgggtttttaaaaaatattttagtcttctattgtgtctagtctgaaaatgacttatttgctttttaattctgcgaacatgtttcctaatggaagggtcagaaatgttctccttgcactttccattggtgctgcagttgagagaggagaggggagtggtcaggctccccctgctcatcccaggggccctcacaggggctgctttgcggtgtagaccttggggaagcagctcacctccgagcctggtgtatgaggaattctcatgaacactcctcaatttggagagagagggactgtgatgaggggggttgagatggtacccagagcctgatggccctcaccagcttcaggagaaacctgctcccctccagggctccttcctagggtccggcttgcactgcattctgggagaatcctgtagccccatcttccctttacccattggccgtttaatggtatcccattctcacatttagccttttgaatgaatcaaccaccatattaaaaaattaatagatttaatttttttttcagcagttttaggtttatggagaaattgagcagaaagtttagggagttctcctgtacaccctcaccccatttcccctgtttcctcattattaacatcttacattggtgtggtacattcgttaccattgatggggcagtattattattaactggagcccatagttaaaacatattggggttcactcttcatgttgtatattttatgagttttgacaaatggggaatgactcagctaccatgtctttgttttagtagatcgttagttgctttttgtcttattagctgactcttgttttgaggagaactttttgtcacatccttttgcaccccggcttactgtggcgtggggcaggggtactgggggccagctggtctctggggagcagcactcactgcatcctgcccccgccccattctgctcctttctggtctcagcagcctcccttgctcctttcacctgcctaccccagctcagctgcctgctgcttagatgccactgtggggcaaggaagctgcccccagtcggtccccgaggattctgcccagatagggataagaatcaccgcgagtgtttgctgagcacttgggaggcataggctcggcgggaagggaaggcctgcaggctgaggtggtctgctttgagttttgcagcgttgcctgcggtctccgtgggtgagggaaaaggcacagggaggtgcagaagcgttcctggcgccacggagccggtcagtgacagagccgggtctcaacccaggccactgccctcggcagccaagccccttctttattttggaatggccacctggccaactggcacacagggagaactcatgaaaggaggcgtggctcactcctgaagggagagggacacaggagcagccttgatgcgcaacgccccctccaggccccgagtccctgtccttggaggaagcaggactcccaggtgggagaggtgaagcagatggcttcccccactgcaaggaggaatcccggtgctcttctccaccagccttccctttggtcgccccctggcgtccgcgtcattgtgggaacactcgggcgggatgtattttaaaggagtgcctgatgcgtgtgggtgtggtggggttgggggtgggggtggggctgggggtggttgcagcggggcctatgcaggatcccggttggagggggctgcagaggctactgctgggcctggtgtcgccatggcagctggagagcgggcgaccggtcgcttggcgtcctgcttggggttgttgcccacatcaccgagcgaacgttcctgtcccgcccactcactgcgaggctgggcagggccgcttgccagttaattgtggggattattatttttttttttttgtagacggagtcgcgctctgtctcccaggctggagtgcagtggcgctatcttggctcactgcaagctccgcctccagggttcacgccattctcctgcctcagcctccggagtagctgggactacaggcgcccgccaccacgcccggctaattttttgcgttttttagtagaaacgaggtttcaccatgttagcaaagatggtctcaatctcctgacctcgtgatccgcccacctaggcctcccaaaatgttgggattacaggcgtgagccactgcgcccggccggttgtggggattatctgagagttgctggagtgttctgcacttccttgcgaaccttttacctgggtgggcagggggagaggccgagtcaagggaaggaggcaggatgccacacacgccctgcagggagagtcatctgctgggcactgcgacacacagaaagccaggagcctgagccccgcccgcggttgttgaacggagggagaatgaacaaccgctgacttcctggttcctgggtgccgcatcactgcccctctgctccgggtcaaaccggctgtatgcttagcttcaggaacatgtggcaggtggcagcccccggccccgtggcaggtaacggtggttttgcagtgtggcgtgctgtgggggccggcaggggcacagctgggcaggccaggctttctctggctcagtatgcagggctggttcttcccagaggaggcagaggtcagggaggagctctttccctgtgtctcctgaacagcttcatcagcacaccctgcagcggggactcagtgagcatcctgcagctgtcttgtcccagaagggctgtgtacttttggccctgagggcaacctctgcatttcctttctgggggctcccagatgagccccgctcccccaggtcatcctgatccatattgatgtgataaccccctcctcagtccgaaacatctggaggccccgtttgtccgtgggataagaatgggcttgagcatggctgtgggtgctccgtgtggcgacagtggcatgttctgtggcagcttgcttcctctgtagcccgatgtctttgactcccagcccgatgctccctcctcacccagcagaggcccctcctcggcctttgcatttgctttcatttatcttccttctttaaggctgcttttgagggtttactggccagcagcatcatgtgcagtctataaactgtgtgccctctcggggccaggtaggagcctgagagggaatgggagaagtggtcacgaatgattgtgaggactgcagaaagaagacagggctgagaagagtgtgatttcccctagaattcagagatgcctgcaccagctgggttttgaagaatgaataggagtttgccaggaagattctagaggaacaacagcaacaaaaagatttaaacatgggcacagaagaggtgaggcacagatggcacagggatttggggtgtgatggggcaaggaagccatgggcagggtctaggcccaggacctcaggtgctttgcatgccatgacttggaggcaatggccttgtcatgcagaactgtgcctccctgggccccattagagtccctggctcttggtgtgcctttcatgcccacaccacggtaggagcaggcaggtggggtttggcctgggtttccccaaaatggacactactccttcttgtgcttcagtatcagagtgggcccgtggagtgggaataaatgtttgggtttaggaggcctccagctgggtggcctgctcccaggcaggaaacacagattagaggaagtatcaagttggaaggcagcagccgtggatgttaaagctggaggaacctcttaaggaatggctgtcagctccctcgtttggtgtggtaggaagatgagggtgagaggggttgggagcaggtgctggagctggagcctgaacccccatatctcagtgctgccatcatccttcataataaggaaactgaggcacaggcaggttacatagtcttctcaggatgtcagtggcagagctaggacgtctatctctgcagctcagttctgtgcgaagtccaggcagatggtgctgatcagtaaggggtgctggctgagcgctgatggccacctgcatctcaaggagaaacagtgtcactggctaatctgatggcttctctgggcaccagcacgtgggcaccatcaccctttctctgcagggggtttgtttagtgtatttggtagaacatcccccagcctactaggtgtggcatgctctatgccacaagctctgtatctcaggcagcattttgtactttgaaaaaacaagttgggaacagaaccctgatgaatgtgtttcatttcctgtcagagcaaatgaaacctgaaatattaatggcacgagatttcccttatcttcctacaaaatcttcctacattgaaaaatgtactccccacaagcttagcatgcagctctgctacctgtggcccgaaatcattagttgtccatactcactgacctttggaaataaacacgaaggttcacttgaagacttgggggagaatcacggtcaacttgtgacgcttggtttttcagatattcagctgctctggagagccttggagttccagctgctctagaggttctggggagggagctgttagcctcccatatgagcgtgtggcccatcgttgccatccacacctgcccctctgtgggtgaataagtggtttcctttctcagctggttgacgcttcatttgtttgtgttctttttctttacagtctcctgaatatttacgcgttgctgaatctcctgtggacaaaccaccaataggccaggactgtcctgtggacagacggggtgagcctcttcttgtgtctggagattctgagtgagtagaacccgttatgatccccactgcacttaatgtggcattcatgaatgagtctgggctgatgtgctaattgggggccgtaagaagagttatagccacgatggccctcacctttctctaataaaagcttaaacacagctacggtaaatatttttgctttctgctttcacaaacttcacatacgcttacatttattttgaggcgaaaggggaagaacagacatttacaggggaccagttgctaggagaagactgtgcattccctgtaaccctgtcagtctcacctcggagatcctgtccctggagtgccccaggtcccttttcccagctgcactgagtgcctctgtcctcctggtggagctgtgctgctttcttgggcagcctcccttccccatggggtgcacataggctgggggcatcccggtggtcagttcttcccagggacccaggaggaggggctggcagaaagtgggcaggttctttccgctcgacctggcaataacaattcctaaattgctcagcaccccaggctgcttgccttgacccaggtagccagtcccaggcaccaccagtgtgggcagggccctccccaggggcagcagcagggcagcccaagacactggtggccaccacagttagtccccacaaggcgattgtgcaggacatgttctcgagctgcctgcagggtctggttgtgggagcagctcagcccctcctgcagaggtgggagcatcttctacagccagccattgtcccgcaggagctctgtgcccagtggaatatctcagtgcagtgcacaatggggccacagctgtgtcacagccatgctctgtcctttagtgggccgtctgagccacattccacctgcctgttctgacacactgctctccctcgatgaccctgctcccactggcctccccatggtttcgatctgtaacccagaccctgttcccaggagctggctcagcaccatcctgctccacaccctctctcaggagacatcctaacctgcccagcctgtcctgttcctgcctctcaacccagaacactgcaggtccttcaggtattcggtgagaccttagaagcaggcacagcaggatttatcccacatgcaccatgcaccgtgctgaggaagccacggtcactcccctaatggtcactagaggtgagagaactgaggttgttgcccatgtggtagaactggaattcagggcctcagccacacctcagtcaccacaccacgccctgtgcaggacgctggggaaaccaggcagctaggactggcctgtgccttggaatgcttactcagaccacccatccttgtcccctttgcacctcaaaggcttggtctacttttcagacacagtttttatattgtcagcctgatacatatgcatattttaagatgtcaaagagttttataagttttatgaaaaaaatagcagacccctggcctcccagaccatctccccaccgcccctgccctgcccactccccatagattaccacttccagctcttattgcttcttcctctggatttatctccacatttgtaaagaatatgggcacgctgctatttcttagtcttctgttgtggtcaagatggttgaactcgtagatttccctcctgagagctgctccatctaaccctaaccctaactctgatatatagagttatgtcatcatttaggtgaacccttatgcagtgtgtatcagtcaggataggctgcctcatgatgcaggaacaagcatccccagacctgagagagttccgtttctctagcctcctgccctgggggtgggtgctgagtctgggggaggtgtggggtggggggaggggcctcagcgctcagcagacaggtgctcactggtgtcaccatgttccctgccctcttctcatatggaacacgtggtgcccttttgccagggcatccctgctcaggggtcaggatagtcctcctctgagtggctgggagtctgactgctccctgtttagactattgagtagccccctgctttctgcctcactccctttttgtgctggtgtctcagtgcttgggccttttggggttttagaggtgggccgtgaggctgggcatgaaaaggcttctctgcctccaccgcccccccggggctcctcatccctgtgctgcctcagcacttcgtctggcaagatttgcaggtgcagttttcatttctcattctttgttggttttgagtgatttcaagagaagatgcagaaaggctgtgaccccacctctaaaagccagcggtcaacctggccacccttaagcctgttctagtgggccccctgccccgttgccctgctgtgacagtgtcccacgaggacagactcaacacaggacttcagtccttgccttcccgagtgctggcagccctggtgctgttgctttccctctcccctccttgttctcaacctcaggaggaaaatgcccagtttctcatgatgagatatgatgtcatctgtaggttttttttttaaaaaagtgggtaaaattcatataacattagccattaaccagttgaaagtgtgtaattcagtaacatgtagtgcatttgcagtgttgggcacccactatctgtgtctagttccaacaagttttcttcatcccagagaggaactctccattaagcagtcactccccagcctccctaccccagtctctggcaaccccaatctgctttctgtctccatggacttacatattctgaatgtttcccataaattagacatcatataatttgtgaccttttctttctggcttctttggcttagcatgaagtttatgtggatgacccatgttgcaacatgtgtcagaacttcagtcctttctaaggctgaacaatattgcattctgcagatacaccacatttgtttgtgccttcatttgatgggcgtttgggtagtttccaccttttgactgtcaggaataatgcagctgtgagtgtgtgtggatagtgttagattcggtatctgttttcaactcttttgtgtatgtatttaggagtggaattgttgcgttctgtggtgactctgtttcacttttccaggaactgccaaactgttttccaccacagctgcaccgttttacattcccgccagcactgaatgaggattctcattttcccccatcctagccaacacttgttagtttctgttttttgtttctttgtttcatgatggccagtctatgggtgggaagtggggtctgactgtttattggcatttcctgaataggttttttggtagatgttctttatcaagctgaagatggtctctgcctcatttagtgagtggtttttaatcagaaatggttgttggatttttgtcagatgctttttctgcatcaattgatctgatcatatgattttgtctctttagtctgttgatgtggtagattatatccattgatttttctaatgttgaaccaacattgcagccttggaaaaaataccacttggttgtagtgtataattctttttaaacgttgttagatttgatttgctaataatttgttgtggatttttaagttgtttgctcctgagaggcagtggtatgtcattttcttataatttctttggttttgatgttaggataattccagcttcataaagtgaggaagtgtttcttcttttccaatttctggaataggttgtaaagaattggtgtaatttctcccttaaatgtttggtagaattcaccagtgaaatctatcttccttttactgatttttagtttaattctattgtagtctgagaacatatttttatgatttctatttttaaaatacttgttaaggtgtacttcatagctcagaatgtggtctatctttgtgaatgttctgtgcaagcttgagaagaatgtgtattttgctgtagttggatggaatattctataaatgtcaattctgttgagttgatttatgatgctattcaagtgaactgtccttgttgattttctgtctgcttgttctatcaattactgacaggtcttgaagtctccacttataatagtggatttaccaatttctcatttagaattaaaattctctcagattttgccccatatatttcaattatctgttgttaggtgcatagcctttaaggattgtaacatcctcttaaaaattgatttttctctcattatgtaatgtcgcctctttatccctgataattttccttggttggtagtctgctttgtctgaaattaataatggtactccaacttactttgattagagttagcatggtatacctttctctatccctttacttttaacctaccagtgtctctgcatttaaagtagatatcttgtagatagcatagagttgagacttgtgttttttatccactctgaaaatctctgtttcaatgggtgtgttttgatcattcacatttaaatgattattgaggtacttagattaatatcaaactttttagtaactgtcttctgtacttgccagagacttctttttctctctcctctggtttcaatggaccattttatgtgatgccattttatctcctttcatagtgtatcactcatacttctttttaaaagttttacaatatatgtttacaatatgtatttcaaaataatctaagcccaccttcaaataacactatacctcctcccatttagtacaactaccttataacagaatactcccaaatcctccttcctgtcccttgtgacattgctgttaattatttcaattatccatatgtcataatcatacagtatatcgttaccattattgcagtaaataaatttatttttatatcaaataagagtaaggaaaatagaaaattttatttcactgtcatttattcctttttgaatacctcttttttatgtagatccaagttttcaacctatataatttttcttctgtatgaagaaaaatcttttaacgtttatttcagggtatatattgccagtaatgaattcccttggttttgtttgcctgataaactatttctccttcatttttgaaggatactttttctgaacatagaatgctaggttggtggtttcttctttcaaaattttaaggatttcactccactctctctctctctctttttttttttttttttgagacagagtctcgctctgttgcccaggctggagtgcagtggtgctatctcggctcactgcaagctctgcctcccgggttcatgccattctcctgcctcagcctcctgagtagctgagattacaggcgccagccaccatgcctggctaatttttgtatttttagcagagatggggttttaccatgttgtccgtggctggtctcgaactcctgacctcaaatcatctgcctgcctcagcctccccaagtgctgggattacagacgtgagccaccgcacctggcctatccaccctcttcttcctttactggtttctgatgagaagtgggctgtaattcttatctttacccctctatagataaggtgtttccctaccccgctggtcatttgccttagtcattttctctgtctttggttttctgtagttcaaatatggtgtgcctaggtgtagggtattttgctttttgttttttttttgttttgttttgttcttagtatttactctatttggtgttctttgagcctccatggtctgtggcttggatctgtcattaattttgaaaatattttggccatcattacctcaaatgattttcttctccattgtctcttttgttcccttttggtattccagttacacgtgtaacatctttgatgttgttccacagttcttggatactttgttctgttcccctccccaacccattattattatttttttatttttatttttttgtagaggtgggactttgccatgttgcccaggctgatcttcaacttgtgagctcaggtgatccccccgcctcagcctcccaaagtgctgggattacaggcatgagccgctgtgcccggtcttcccaccattctttgtgtgcatgtgtgtttcattttgagaagttcttgttgacctgtcttcaggctgattattttcagccatgttgatgagcccgtcaaaggcattcttcatttctgttaataggttccttttgggctgggcgcggtggctcacacctgtaatcccagcactttgggaggccgaggcgggcggatcacctgaggtcgggtgtttgagaccaatctgaccaacatggagaaacccctgtctctattaaaaatacaaaattagccaggcgtgatggcgggcacctgtagtcccagctactcgagaggctggggcaggagaatgacgtgaacctgggaggcggaacttgcagtgagccgagatcactccactgtactccagcctgggcaacagagcgagactccatctaaaaaaaaaaaaaaaaagaaacatgttgtcctttttgtcttctagcatgccttgtaagttatttgaagctagatatgatgtatagggtgatgggaactgaggtaaacaggcctttaacgtgaggttttctgttaatctggctatgggctacgtgtaatgtttgttgtagctgtgagtgccggcgtattccgatccttgcagtgcccttgtttttgtcctctggctctgggcttccctaaattcccttcctcagacagagtgagtgtcgtgcagctctcccagctttcacctgctgttgtacactggagtcctgttggtgtagttgtagggtgtggggagggccagcggtctatagtcttctgattacatctcagtctttctgtggtcccatttccctgggctgtgactgtcacagatgtttcttcttatatagcttttccagaccccaaacaggaggccagagggggctggactcaggaatgcccttcctccgtggctttgcaacaaggttctggtaaagtctttccctgcggggagcaggcctttgtcctagagaaggctctggatgcatttcaccaggatgacgtttgtcctccctctgccagagtcaccaggagatgtctcttgggttttcatggtgagaacctagtagggatcctggaggaaaagcccatgaaagttttgggcccccctaagactgtggcttctaggagtttctcagtcatgggagtccacccttggcctgcagcaatttgtcagaattacccaaactactgtggtatggccctggaggctctgttccaggtcagtggatctttggatttggctgtgtctctagatttcaggggggcgggttgcaaactcaattcactgatgagtccaaagaaggtcattgattttcagtttgtgcaccattttctagtcatgaggatgggagtgatgacttccaagttctttacgtgttggagcggaaactccaatccttcccctgctttgattttcctgttaccctaaccgggaatcatgtttgttatttgatggtttactcagttgtcatctgtcttcctaattaggacataagctccagggaactggagtgtcagtgttcccttgcgtccttgcacccacaagacagcctggcacattctgaatgaatacaccgaaagggataaataacgaggccaagccacctggctatgggtggctgctaatccgtaggatttctcgtgccttgtggtttcagtgaatttgcgacacacatgagtgatgctgccaatgggaggctcccagatgtcctcaacaaatagaggagtgaccactcagatccaagggtgtagcacttcccgcctatcactgggagctgatgggctgtctttagcatggcactttgtatggtgctggcgcccaggcttccctggggcaacagcgttggcccaggcgacacacaagaagaagggggtttttctgtggtcacttccgcgttgctagttgttttgccctcttactgtggctaaaccttctgtccatacctgtcccccattctcagtatttggcttttcggattgcagtagtgggacttgggtgcacattgcaataaaccaatttgcccccattatccatgtcttgttgatggtcccactgccagcatcagttcttatgaacagatttctaaaccatcaccatctgttctgctcttaatttcaagtgtaaaaagtattactttcctaattccgtcaaggggagggagaatatgtattcctaaagaccacagttcttgtatgaggaagtgtagatctgccacccacctactaaaggaaaggttgcttctgcccatcctcaaagctgttgagcagttatttacctagagggtaaaactggcccattcgcatctctataaaaacaggtaggaaaaggtggaaggagctgagttggggaggtggaaggggggcaaaagctatgtctcccgtccctccctgacagtgcagccccccaaccctccagcccccgccagtataggtgggaatgggctggcagggctgcattgtggtggtccctgctgctgctagggctgtttccagaagaaggcccagtttcaggcttgacttcccctcagaagtcataaggaccataaggtccatctgggtgggcgctgagctctccacgatgggagcaggatagacatgagcatcttcaccctcgtggtccctctgagcctgccctgggggtgagctctttttctgctcaaatgaacattccaggcaggccctggagctttctgtcgttctaaggcaatagaaggttctttggttactttcagtcccaggaacattgttggtcagtcatgaaaaggagtaattatagactctttggagcttctcccacccggctggagcctgacctgtcttggagccggctggggagggagggctgtgtgtctccttctttctttctttgcctctgtttttgctggccagggagtgttccgagggatggagtgtctggggagagggcattctctccacaagtgggctgggtggcacttctggggtccagcagatgtttcacttggacttcctgtctccagtgaccctcgggtaggtttcttagagatgaccctgctgggaacttgcagctcttccctgcgacctgtgggaggccttgctgggctgatgcccttgactgctctccctatcctccaccatgcccctcgggagtgctcctgggctgttccttcaaggcggccccaggctggccccacactggtgggagcagcaggcagctcctccttgggcagctcctcctcttcccctgtgaggcagctctggtcatggcctcctgcctctggattctcaggaaactcgggtgccgcgtccgcagacattggggactcggtacagctatcctaggggtctgctagaagccctgtttgggaatcatggtgaagccacctccccagccccctccatgaggcacagcccttcacggaaagtccctgctcctcttctggtaccccgtaggccagaaaccatgctggggtggggagctgggagcatctgttgatgtgggatgcaggcgtgcttgtcacctctcctggccctcagggcagcaggacagcttacatgaacatctcatcccgctgctggtggcctctggtgagagactactccagtcggtccccctgtagctcctggatcttagcgggggcctgggaatgggaggccacaaggaggttccagagctaactaaagccgctgagactcagagggagtctcacgccactgcctcctgtgcccccatcccctagcaaagtgggactgatgagggatgaccttgcgtccttctcccctgttcactgggacctggtgctgttgccaccgtgggcccaaacatccactgcccttttagcaaggcagcgctgctccatagggtccagccggggaagcatctggctttgcacaggtggaagatcatgactatttccagagtctgttgccaggctccatgtagttcaggagttgtttctccctctgagagtccaaagtggttgttttccggagtttggcagtacctaagggttaattgggatgttattgtctgcatttggcttagagataggaaagttttatgtttattcaaattatcagtaatttaaaattacaattttagtcttaattgtacgtatttggagatcccatttaagtctttggaaataattgcagagtaatattttgggaagttatattacaatgcacagacgttcaagtggagaaaggtccctgcgtgtgagccttggcctggcagaggggcatccaggacaggatctacagcacacagccctcccaactgggtctgggcatggctgcagctgagtctagccctcctttctgtgctgctgcatcccaggggatacggccacacaggccacagttgcctagaccgacctggtgtcaggatcactgtctctgctttggtaagatgtccttgggaggggaagggagccagccaatgagatgaggggtaggagggtgacagggtggagcagaccctcatgctggcagaagagaggttcacattcaccagggagcaggtttttctgaaccctggagagctgaggggggcacctggagcacccctgcagtccacagcatggggtgctggcttctgtactgtagtgcagtgccatgaggtacccatcccttgcagtggggtagggtttaaaacccagaaggcagccctccctggagcacagccccatggtgtttagagaccctctcctctgagcacatgcaggatgtgacaatgcaggtgggcctagtgctgcagtctcagagacacccatgggcttctgccatgctttttatccaccagggcagtaaaagcaacgtccacagtggcttagcctcctgcaaagcctgtggcaggacagccagggttccctgacagtggagatggtggacggccccatagggggttggtcccatctcgccagcagaagtgacctgtgtggccttagtggtcagtgctgcctattgtgatagtggattgtttaaagccaggtcccatcgtggctcctgagggaatgaaaatgaggggttctttgctgtgatctgatgcttgtgttccaccaaatccatattttggaattcttatccccaaagtgatgggacctttgggagggagacattggaattcacattcccaaggagatggggccttatggaggtgtcttaatctgtattctgctgctgaaacagaataccacagattgggtaatttataatgaacagaacattatttggctcagagttctaggggctgggaagtccaaggttgagggttgcatctgctgagggccttcttgctgcgtcctaacatggtggaaggcatcatatagtgagcgagagagggaagggggccaaactcattgttttattaggaacctgctcctcagtcactaacccactctcgcgataatggcattaatacattcatgagggtagagctttcaggacctaatcacctcttaaaggtctcacttctcaacattgttgcatcggggattaggtttccaacacatgaactttgggggggcacattccaactatagcagtgggtgatcaggtcctgatggtgaagccctcataatgggatcaatgccgttttaaaagaggctgcagagagagcctcccgccctccaccatgtgaggacagagtgagaagctgccgtctctgagccatcacgcaggtactcaccaggcacggaatctgctggctctctggtcttggacttcccagcctcctgaactgagacaagccactttctgtcatgtataatctacccagtttatggtattttgtgagagtaccctgaatggaataagactcccttcaaacaaatgtcctgctctttgaaagagagtgtggggctcacagtctgctagtaaagacagttgtaggagcaatggcaagcccacactggctcggattttcagaccttatcattgagttaggagcgaagtcctcgacctgaggttttattggtccaaagtcagggcctgctggagcccgacaggttgcgtgcttggcctgtggagcagttttctccagagcacctctatcccctctgccttgtgccaggcccagcagggactgagggtagaataatgacaggcacagctcctcccctcaaagagtccactatctggggtttgatgctggagcgcaaggaggggctgcccacatgggcggagcagagggcctggggaagttccaggaagaagtgactgtgtgccgaggctgcaggagtagaggcagcccaggagaaaggggggcatgggctggaggtgggggtggttccaggcagagagagcagcttgcacacgggaaaacaaggcatggagtgggcagctccttccgcctggtctctaaacctgtgaagagggggctggggagaagagacgggggtggaggagagcaggactcacaggccagccagccctccacagccttgggaacagagtgaagagcttggactgtgtcctatgtcctggggccggtgccactgcaggctttggagccaggagggactcagtggagcttgctgtgtatgattgtgagtgtggggaatggtttggggtgggaggcaggacaagcagctgtggactcctgtctgcaggtgagtgccagggctcagtgtgggttctgattgggctaagtaggtgcccatctgcctggagtccagctgtccttgtgtggtctgtagaccttgttgtcaaggtctggcagctcaacgctggtctttctgagataatgaaaagggaaaactttagaggcaggacgaagaccttgtagtgaccagtgacatccccacagggtctaggtgtgcgaggtctattggcgcctgtgtgggaaggcgggaaaccaggggcttggggccagctacaaatgccacactgggctctgccttggctctaggtgctttggttgctggatttggtggtggctcagggcagtcacttgtcattctcagtattttatcccctggggcctcctcagagccataggagatggttcacctctgaaggactgccccatgctgtgcttggtaagctcggtcacccagggctgtcacagagatgggctatggcccacatgggctgagcggatttctgccctgccacctacaccttgctgtgattactttggcagtgtttccccgtcaggagagcaggtgggaagggaggcaggtccctgaactgggatagagcccggagacctgggtgtcctctgctctgttgtactgacacgctgcgtgcttatgaaatgagggcaggggttctcagtgctcccatggcatggtgactataatccatgaatgatgcccacacagttcctggcatgctcagtgtagccttgttgttgtaagagaaaaaagcagggattctccacttccccacagagtgaactggaacgaggagagactggtatttctccaacactaggtttctttggatttttatgctggttgatactccctaaatcacaggtcgccttaaagagagcaagagccctgcacggtggcccggacccttggggccccttccatccgatgcacctcgtggcccagtctttacctgctcaccatgcacagcacttcgcatgggtttggaaacgtgtcatctgcatggcaaggatgggaatggggagtgggaacctgcagtttagggtccaggcgggtggattttaatttgcccctgggggattctagggccagcagagctcactgccgctgctgtctgggcctccaggcagtgagctgctgggggagcccctctggaaatggacagtggctgtcagggcgtaggacgctagggggcgaacagaggaagtagaggtatctggggctgaagttcaaggttgcagcatgaagttcagggttgcagcgcccagcctagcagggcagggttcaatctgcaggactggcatgaggaggcagaggagtcagccaagccctcccctcagcctctctccagacactacagatccaaggccaggtctgcatgaggacagccacctggtctcggctgaggttacaggaagggagtcggggcaagggccagtgagtttgttcctaatttgggtcccctaattgtccaagagaagaagaaaaggcctaatttctgtttcgctaagttttagactactttagttcatgttctttaacaataggttattcatgcagagctcatctctattaatcaaaatgtatgattaggcagaaagccctattcccacaccagagtggtgaaatgcagtgcatgtgtgttcagatcaatttttgaagtcttgattttgttttgttacatgtttatttgattgcttgcagaagaatgaagttttttggccctctggaaaatttttctttctcctgagaggttttccaatctagtagaaaatagacgcagagtttggcttgcactgattgcggcattagaagcggccctgtacattttaatgtggaagacgtgatggttttgcgtttgctcctccagttgtgccccatagctgtctttctgccagctctcttgcacatttagttcttgagtgagatgttctaaatagaagccatggtccattcagtccccagcctgctgtccttctgtgacccgccagccagctttgcttagggagctatgagcccctcctactaggctacaaagtcatgggcaggaaaagcatttgtgcacagccaggagcagagcacccaggcccaggtctgtcccggagccatgtggacctggcgaatggctgttcaggtcagaagggggtttggatacaccggttctgtgtttcggaggccagcgtagtccccagtgtatttcgcagaagtgatagcagctttattcccaaggcactagtgcctgcgcgttaggcacgtgctgggtgcctgcttgagtgtctcctttgttcctctctatcactggctgtcccctgcagaggcaagcgaggcagagagttggctggtaacagccagtgtccgcagagccccagggctccctgactgggctgtgccacctggggacaggcagatagaccccaagtaaagttaaagggaagcacagtggggcctgcacaggatgtgagttggaggctctggtgaaactgagacttggtgggggatgggaggcaggggccctgctgggacagacaggagaccaggggccagtggcagaaatggtcctcgatctaccctcatgcagatggtggcctctaccgggagccctgtgtgtctctgagccttagtctccctccctccagtctgcgaaatgggcataatagaaatgatgcctctcactaataaatctgtgcagaaagagaaagcagtttgcaactgcaaagcattattcaggtcttcctggctctacctccaggatcgtatgcctccgctctctcacgagacacaggcctcccatgtgcccggtggtggtctcgaggtcatctgagccatcatccacccctctataccggggacagtgtgctgccaggaggggcaccagaagaggtgtcatacagtggcatgctgagctaggatttgaggcacttcctgcctcttctagttccttgtgggccgggggtgctttgctcagatggtgctggggaggaagggcaatatctaaggatgtattgagagggtcacattcaggtgtgccatcttctgagggacagaaccctgtcacgacagttttgccgtgactgaattcccacattgcagagtgcgcttggggtgtggctctgaacatcgctggcaggtcaggtggagcctcgctgctctggggagctgtgcccaggttccctcggttcctgaagctcagaggttgcaggagaaagggcctcctggtggctgcttactctgccccactgtgaagtgcctggtcactagagttaggcctctctcccactccgggcttcagggattccactgaggatggagggtgttggatttagtttcttttttttttcttttttttcttttgagatggagtctcactctgtcgcccaggctggagtgcagtggcaccatctctgcttactgcaagctccgcctcctgggttcacgccattctcctgcctcagcctcccgagtagctgggactacaggcgcccgccaccacgcccggctaattgttttgtatttttggtagagacggggtttgaccgtgttagccaggatggtctcgatctcctgacctcgtgatccgcccacctcggcctcccaaagtgctgggattacaggcatgagccaccgcgcctggcccccttctggagtatttcgttcattagaagtaagtcagggacttagtgtctttagctccagccagtcctgtggcctctctgccactgtgtgaatgtccccaaccccccacctgataagcaggtgtcctgaggtcatcagggatttggacttagttattaaaaagcaaccagcacccttaggagcctccagagcagagattgccaaactttctcagaccacggtgccctggatctcagcaatttcatggtgtttctagaccaaaacacatagctaacaactctactctttaagtagctaggtccaaaccacatggtatttatgtcccaacaacttggaagccacatgagaaataatactcataaattgaaacaaatgtatttcatcctaaaccacaattacaaacggaagtgtgtctgctgaatgagattggcaccattctcatttcctgtttgatgctgacttttgtgtgggacttgctgtttaaaagtttatttttatttttaatttttatacacatatcatagttatacatattatgggggtacgtgtgatattttttcttgagacagcgtgacagagttttgctctgtagcccaggctggagtgcaggggtgcaatcttggctcactgcaccctccacctccctgttcaagcgattttcatgtctctgcctcttaagtagctgggactacaagaggtacgccacctcgcctggctaatttttgtatttttagtagagatggggtttcaccacattgtccaggctggtctcaaactcctggcctcaagtgatctgcctgcctaggcctcccaaagtgctggaatcacaggcatgagccaccgcacctggcctacatgtggtattttaatataagcatatacattattaattgtggcaaagtacacataacataaaataccatcttaatcattttaagtgtatagttcggtggaattaagtacatcaacattgttttgcagtcatcaccatcagctatctccaaaacgttttcatcttcccaaaacttaaattgtgcgcatgaaacagtacctctcctttcccccttcctccagcccctcccagccaccactctactttccctctgtctgaattcacctctctaggtacctcatgtaagtggaatcgtgcagtatttgttcttttgtgactgtcttatttcacttcgcatggtgtccgtaggggtcctgcacgttgtggcatgcgtcagaattgcttccttttttagtgctgaataacactccattgcgggaatatgccacattttgttgatctgttcttctgctgctggacacgtgggttggttccgccatttggattgtggataatgctgctgtgaacaggggtgtacagatgtctccctgagtcccttctttcagttcttttgggatatacccagaagtggaattactggaccatatggtagctctttttaaaattttttgaagtgccatactattttccacagcagctgcacccatttacatttctattatgccaacagtgtacaagggctccaatttctccacatcctcaccagcacttgtgttttcattttttttgtttttcttttctttcttcttccttttttaaatggtactatcccaacaagcgtgatagcaggaatttgcttttaattacagctacttctggcctcacgagacgtctttcagaggaatgtagtgtgatctcaccttggaaacgagagctgcctcaaggcagtggtgcatgcggtgctgacaggtgccaagggtcactgccttccccatggacatctgggctgtgctgcagtgcccctgtgggtgcagcagggcccctagggtgcctccgtgcagcttgggagccatggaactagacagtgtgcttcagacgagtagataagcacagaaacagagccgtaaggactggggggaacgtccagtccatagttctgtgtggaaccacgatccacggaggcagctgaggggcaagtgtagtgtacgtggctgtgcgctccatctccgtgcttacagccctacaaagtgggaagagaatggaagaaacaggagagaaaaagtcccgtgtggtttcccggaatcctgtgggtagtgagagtctcagcattgttattcctagcatgttttgtgtgtaacgtgagatgaagcaaatgattactgatgtgatcttttaactctgaggaccttgaccaggattttcagtggcgaggagaaaggagatacggaggaaaggtgctgcgggttaagaaagcctcgggaggctgggcgtggtggctcacgcctgtaatcccagcactttgggaggccgaggcaggtggatcatgaggtcaggagatcgagaccatcctggctaacacagtgaaaccccgtctctactaaaaatacaaaaaaaaaaaaaaaaaaaaaaaaaaaaaaatagcggggcgtggtggcaggcacctgtagtcccagctactccgaaggctgagacaggagaatggagaatggcgtgaacccgggtgaacccgggaggtggagcttgcagtgagccgagatcacgccactgcactccagcctgggtgacagagcgagactctgtatcaaaaaaaaagaaaaaaaaaaaagaaaagaaaaagaaaaacaaagcctctggaatccggaactacaaatccataagtagccctagagcgttccctggagaggcctggaatcagtggccaaaccaatcacacggagcacccccagtcccgggtcatgtcttgaaattcagttttctgctgaaagaagctgagactacttggacaaatggttgataccgggttgggggcgggaaatgtacaagttgaacctaaatgctttgtcatagcagataataaaggagccaccctggactgtgaggatgtgattctgctgagagagagcattaaaagaggaaaaaaactattaaagtcaaagtccacgaggatagtgttaaaaggactcgtgagctcacctgatgaggccagagatggacaatttgaacatcagtaagagtaaaaatcacagtaggttgaaatgtatgcagtatgtttaagtccatgagtttttttaacaatactcaggaaataaacctaatccgtcacctttggagaatgctagggaaccaattatatatttttggtaaataagggaaagctctgaaatatatatcctgcttttcttatgcaggccgcactactgggtgagcaggtggcaggttgggaggttccatgtatagaggatggaacctctgtgtctgaagcgtctcagcacatctgaattcacaagctgggcgctggtggccctggggcctgctgacatctcaggaagggaggaagagccacactgcccgggagctggtctgcccctattctaacagggatctcattcgacttccagatccaaccactgatttgcaggaacggaaaggacagaggacgatgtttggctgtgcttcaggcacctggccatcaaaagccaaaccatgggaaatgctgtgtgaccaacgactcttcagttaataacttgggaggcaaaaaaaaaaaaaaaaaaaaaaagaggtggaagcacaaccaacggttaaaggggacataaaaggcacacatagtgtgtgtgtagggacatgtgctacatggagcagggtggggctatgattaccctacaaccaggatgtggtcaggggcacacagggaggctgggtcccgagggctggagtggccggtagggcccctcttcttccctgcctgaggattgtaaaggttgtttcatagccgttttgtttgtttatttatttatttatttatttagagatggagtctcgctctttcgcccaggctggagcgcagtggcgcgatctcagctcaccgcaagctccgcctcccgggttcacaccattctcctgcctcagcctcccgagtagctgggactacaggtgcccgccaccacgcctggctaattttgttttgtatttttagtagagacacggtttgaccgtgttagccaggatggtctcgatctcctgatctcgtgatccgcccgcctcagcctcctaaagtgctgggattacaggcgtgagccactgcgcctggcctcatagccatttattaagctaaatatttacactatgttttctaaaaaagtaaaattattttaacaacataaaagtcaaaggaagaagttcctggaagtggtcttgaaggtgcaagtgggcaattgtgaacagtctgctggtgcaggatgtggcgcttcgtcgtgggagtgctgtctccctccactgtgggccgcgctccttcctgcagcactcgcagctcactgctgccatttcccgtgtaatcctgtcttctgtcttgactcagacccactcgtatctttgttgtctggggtctgcgctttactaggggaccttggagttctgttgttggctgtgacttcattccatgttctttcccataaggaactgtgttgggaatagtttgatgattccatggtcatgccttttggccttttctgtgaggggcgaatggggagcacatggaacttattgctgctgtcttcagtatttcttgggggaggaactcggtgtggttttttccagcctgagcccaccctgaggtcggttgttggacccacctgcctgatgcagactgccagggtcttcctgccagcgcgggatcccccactttccatttcctcttgcaaccatcagacccagggacacatgtgtggctccttctccagtaagcgacctgggaggtatccttaccccaggacccgagtgagcgtctgttggagactcccaggtgtgcaggccagaaggacatgcccagttgtgtggctgcctcttccctgcagggagagagagaaggctggcgtggggcttctccccgggctgggcctgcgttgtccccgaggcccgtggccgctggagcagcccctgagcgactctgctccttcctgggcctcggtttcctcgttctcagggggggcttctgccagactgtctgggagatgttttcagccctctaatttgtgcatgctgtgactcacccaaaattacagagcaaagctaatggaatcaggaatttataaatcccccttccttcctcacgcggttccttgagtttttgaaaactaccattcagaatgagacagtggccttctacctgaggccacagggttgtctgtggcctaactgatttctggccagtcaggctgggtgagcctcaacagcgtgaacatactaaaggcttcttccttgccctgggacaccggttctggccaggctacagggctcacagctcagacctgcctctgcctgggagtgacacggtcccctctgctcacgtgccatggatcagagctgccatgtggcccagcttagggagaccaagaagcatgggagactccccggctatttgacgagcaggacctgtccatgccatctcccatctgtgccctgcatctgcgacttccaaagagcattggcctgcactgtcctatgaaatgctaccacaagccctttctggcaagtgcagttaatcctgttcggtgggttaggaaaccaaggctctgagggaggctttcagtgccacagctgggaggtgagagttgtgagttgcagatgtctcagccatcccgagcgtgaccattctgagtggcgggaagcttttcactcagcactgagtacatgatgcctacagtgttctgggcctcctccatcaggaatcatgggcccttctccccaggacgctcatcgatggccccggctcctccagccctggctcctccagccctggctcctccagccctggcccctccttgggctgtggctgcaccctgggctccacccattccagacccaaaggcccatgggccaaccagacaccgcccctacatggtgtgcccacaggctcttatggatcccagagggccccctttgtcctgcttggggaggctggggtggccgctacacagtgccctgccgtggcccccatgctccccaactccctactgtgtctgctggacgtttgaacagcctcctgccctaaaccttgcatcctgccacctctggcccactctccaccctggcctactcttcaccctggcccactctccactctgcagccaagtgatcttttccagcagcacatgtgactgagtattgctgatggctgcgactgctttcaggatcaaattgtgtctcttccgaaagagacatcagataagagacattggaaaagaacatgaattgcggtcacccagagctctttcgcggtttgggattaagccatgcagaaaggtgtgcaggagcctagatcacctgccaacctgcctcttgccatcctctattttgtacgctcagtcaccccagaaaattgctccggcccttggatttacctccgtgtcactgtccatccggtaccctctgcctgggatgcctcctgggtctccatcacccgcctcactcgtttttcctctgcacatggcatctacttccgcccttccgcaggacaccttcccaggctgggtctggaccaccctgcggactcgctcctcgcaatactggccacatgccctcaagcccatctgtttcttagagtcgatgtcccctaaggtgtgagttcctggtgagcaggagaacctgtgccttttataacctggtgtgctgctcggcgtgccgaaggaaccaaggcgatgttgagaaatgaatggaacagctgtactgtgcagagatacgtgcagagaggggcaggaggaagcctccacttcagacttcagtgtgaaaaagagacactggaaaagaacatgaaatgtggttgcccgatgctcctttgtggtttgggatgaagccctgcagaaaggtccgggcagcactgcagccccgccatgctgcttgccccacgtgggttctggagtctggtggcacctggaagagcaggtggagtggaagctgctagaaggtgggaacctgagggtcctgggctggcagaggccttgcccccgctttgcctagggaggcagtgagcttcctccttcatttgaactttgccctgaagagctgggccttccttgttcatggggagcctgatgcttcttcccagcacaccacagccacacaggaggtgcagcagagcatgcggagatccacctggcaactcacagccagccgcggcgtcactgtcaggactctgtgaaaaacaaggtttctgtttggcgcggggacgaccagagggaaggagactggtagagcctaagtattcagccgaccattaaaaagtgaaagtcagaagcaatgtaagtcaaaactcaggacatctcagggtgaccttggccactcacagttgttcgtgtttgaaatcacattgattctcgcagctgtccaaggcgcaggaaataaccactctgggtgatgtcgttgggatggttttgtcagcactcaggatttgggggtttgttatgaaaatttcacgttacaaaaaagggagaagtgcagttttgtgtgtttagggttattggtggctagacatctgaaaatcaggatccccgctcattgattttttttttttttttgagatggagtcttgctctgttgcccaggctagagtgcagtggccaatcttggttcactgcaacctcggcctcccaagttcaagcgattctcctgcctcagcctcctgagtaactgggattacaggcgcctgccccccgcctggctaatttttgtatttttagtagagacagggttttaacatgttagccaggctggtaactcctgacctcaggtgatcagcctacctcggcctcccaaagtgctgggattacaggcggtgccgctccttacattttgttgctgttcccaggaagattgatggagggaaaacacactctccacagaggagatcctgtgtttacagccgtcttagatagagtcgtgatgaggaggaggactctgggccgacagtgtatgagggttccgcctcataaggctgtttggtgtttgtgcccacactgggtgtgacgggttgaagcagtggataacaagcctattactgttatgcaaatgtgggcggcccagttgcattcttcatgcatgtgtctctccctaatgagtttcaaaatcttaatttagatcttgattttgttgcagataggattccaatttaaagagcgtttgtcattcagagactgtggtagacaggaaaatggtcttcagagatatccacaccctagctgtggcgcctgtaaatctgttactttatgtgacagaaaggactttgcagatctgattaagttatggatcttgagatggagagattattctggattattcaggtgggcccttataatcatggtgacccttataagaaggaagctggaggagttaattgtcagaggagaaggtgctgtgacgatggaagtggagattgaagtgatgcactttgaagatggaggaagcggctgcaagccaaggaatgcaggtggcttctagaagccagaaaaggcaaggaaacagattcttgcctagagcctccgtaaagaaccaggccagtcgacaccatgaccttagcccaaggagacctgcgtgggattcctttctttttattttctttcttttcttttcttttttttgagacaggatcttgctctgtcatccaggctggagtgcagtggcgccatctcagctcactgcaacctccacctcttaggttcaagccattttcgtgcctcaaccacccatgtagctgggatacaggcacatgccaccatgtctggctaatttttgcatttttttgtaaagataaggtcttgctatattgcctaggctgttcttgaactcctgggctcaagggatccacctgcctcagcctcgccaagtgctgggattataggcgtgagccactgcactcagccctctgtgggatttctgaactatagaactgtaagagagcaagttggtgttgtctgaagtcactagatttatggtgacttgtcacagcagccataggaagctaacacagagactcagggaccaagcctttccattgcagcaagattgatcagttgttctctcccatcacggggctctcattttgctcaagtcctatgtcatcgtccctcttttcctggagagcaggagctgacttcagacgccagatcttcttttcctgccacagcgcacttgcagctcttgggaggtgaaggttctgcctgctgctcttctggaatgataaacgctgggcccttagtggaaatgtcaggtgaaatggaaggcagctccttgggtgcagtgacaggacctgcagtgggcctgttggagctggcactgagggctgctccccatccctctgtgggtgtattggctgcatgctgactggccgtcctcgtgggcgtggcctggtgtgtgtgcaggtggacagaggctggagtatccttgagaggctgtgcgttctctcggcttcttttggagccagagccatcagggagccatcacctgtcctggcctgacctgtcctgtcatgagtgctgtgttccttgagctgcctctcaggctaggggatgaggtggctgtgctcaggcctggcttctgcaggcttcttcctatctttggagcggctccaccactggaatctgtgacatgagaggcccgtagcccaggcccatcatctagaatggagaggcagccccacagcctcctgggaaccagagctccttgcctgggtcatcacagaactaagccttaaaatcaggaggcctcagcaaagcgcctctagagactcaaaccaccttgtaaatctcactgggagtgaacgattgactttttactcagtaccaggactacatactacctcatttatgggtttttcctctaaattgctaatgtttgaagtggaaattttcaaaactgactaatgtctctgcttcaagatttgctgtcaggcaacttatttataaataaagcagcttttcaaggagcactaacaaacaatccctcgtgttaggagactcagagccaagtcgtggctctaggttggccttgcagggtgttagggagccagttctccaccccagggccatggacttctgggtccttgcaccatccagagaggtgatgatgtggttattcccatgtatagagtctactgttttcagggggcatttgcatctgtggtttcattagatgttcagagcatccccacaggggttagttcatgtagagaaggaatcagaggctcacagaggttcagggtttgctgggtcaccagctcctaagaggggccctttgggctgaggccacggcgctttctttcttgcaagacagaaattttccttttcctttctttgccataatggccacctccttccaccccatatccttcttccctttggccactggtgagttctgattatttttggaaaaaaaaaaaaattaaaactctgggagcttgagactgaggtaaagtcccctttcgtagagatttttggactgacatgttagctctctgccctgtgtaacttcagagtttggtaggtgatggggacacgcctgttggagagtcctggtgtgtccagttttgtccccgcagcttcactggctgtcagagccacagcctttgcttacggctacgccctggaatatttaacagcaatttcttttcgctttcttctgtcgtgttctgtctgtgtcagtgttttgtggtcttactgtacctgttgttttattataggcagatactgtaaacgctgatacagtctgtgccctgcggttgtggtttttagggccttgcggcggcatctttgctagtgctcactgcaaataggggcaggaagcagttgtttgggaatgagccacatggtggaatatcttgaatgtcccaggccaggcacagagcagctgctcagtaaatgttgctgagtgagaggctggggggttggtgaggataggcaggggtgggcgtccaaggctgcagagttgtaaagcggggggtggggcagccagcaagtccagctcgaggaaacaccacggggttcaggggctctgtgtaagaaatggcagaggtttggcttcgcttttagttgttttgtttcttgttcaagtgaggagaacacaccgagaagggaggagagcaaggctggctgagcgtcatggcagggtggtaaaggaatcaatcacccggacaggttgtccgttcatgtgccgttgtttgcattgctgtgatacagactgctgtgccactgaaaccttccgaaaagcaagccacccagagagtgacttgggcaggtgtgtattcatgtgtgcatcagggagaggaatacttgcaaggagcagagcttccagaagaccaagattcagtggaggcagcaagtcagggccgggcagaagcccctggggtatctgcggaagagcactttccagggtgcatggatggatgcgttaaccagccagttcctacgcatcacggaggagaggtgcctgccctcctgggagccgtgcctattccattgcttctgttgtttttttgagacagggtctcactctgtcacccaggctggagtgcagtggcacgatttcagctcactgcagcctctgcctcccaggctcaagcgatcctcccacctcagcctcccaattagatgggacttcaggtgagcaccaccatgcctggctaatttttaaatgttttgtagaaacggggtctcactgtattgcccagactgttctcgaactcctgggctcaagtgatcctcatgcctccacctcccaaagtgctgggatttcaggcgtgagttaccacacccggcctcttgttgttgttagtaaacttttaattctagaacagctttaaagttataaaaaagttgcaaagactgcagagaattcccatgcttgcttcctccagtcttctctctcgttaacatcttacatcacacggtgcatttggcataactgaggaaccaacgtgggtccattgctatgaactaaactctgcagtttattccaatttccttagtttttgcttaatgttttttttctgtcccaggagcctgtccaggccactacgttacctatagtccttgcgtctccttagcctcctctggtctgtgacagtttttcagctttccttgtttttaatgaccttgatagttttcaagagtacaggtctttgtgaatatccttcgatttgggtttatctgctgttcttctcatggttagactggagttatgggtttgggggaggaaaaccacagaagcgaagcaccattttcaacatacatcaatgttgcatgatatcaatatgactcataactatcgatgttgaccccgatcagctggctgaggtagcatgtgccagttgctcactgtaagattaccccaccttcagcggggtgcggtggctcatgcctgtaatcccagcactttgggaggccgagtgggtggatcatgaggtcaggagatcgagaccatcttggctaacatggtgaaaccccgtctctattaaaaatacaaaaaattagccaggcgtggtggtgggcacctgtagtcccagctacttgggagactgaggcaggagaatggcgtgaacccaggaggcagagcttgcagtgagctgagatcacgccactgcactccaccctaggcgacagagtgagattctgtctcaaaaaaaaaaaaagaaagcaaaaaaagattaccccaccttctttccatagtcctccctggaaggaggtcgatgtgcagagcccatgcttaaggaatgtggagttacactccactccttcatggggggtggggatatctgtataaattatttggaatatttctgtatgggggacttatctattctcccccatttatttattcaaacatttacatcaatatggatttgtggatatataatttataccttgctttataatccagtgctgtgttatttattttattgctcaaactgtcccagctttgactatatgaagctctttcaggtggcatcccatgtcccttagagagatccctacctttttgtttttttgagtacagtcagttggccatatccgtgagttctgcatctgtggattcaaccaaccttagatgggaaatatctgggagaaaaatagatggttgcatctctactgaacagactttttgtcttgtcatcattccttaaacaatacagtataacaacgatttatatagcatttacattgtactaggtattataaataatctagaaaggatttaaaatatattgaagaatgtgcataggttatatgcagattctacaccattttatagaagggacttgagcattgaggattatggtatctacaggggggcctagataaccaatcccttacagatacccaaagaaaactgtacctctttctggcacaagatactcaggctcatcttgaatttttcctacccagtcctggactcagctatttctgcaaggatccctgccttattttattgaagaatggtatctagaaaccaaggtctggagacagggttcttcttgtcaccgaggtacattgcttccaggccctctcagcagacagagctaggaaatatgcatgtatgctaatctgtgtatacatatgtatctcccatagtttttttttatttttttattttttgagacaaagccttgctctgttgccaggctggagtgcagtggcacgatctccactcactgcaacctccgcctcccaaattcaagcaactttcccgcctcagcctccctagtagctgggactacaggcgtgtgccaccacacccagctaatttttgtacttttagtagacagagtttcaccatgttggccaggatggtcttgatctcttgacctcatgatccatccgccttggcctcccaaagtgctgggattacaggcgtgagcccactgcactcagccttttttttttttttttttttttttttaagacagagtctccctctgttgctcaagctggagtgaatggcacaatcttgtctcactgtaatctccacctcatgggttcaagggattctcttgcctcagcctcctgagtagctgggattataggcatgcaccaccacgcctggctaatttttgtgtcccatagcttttttttgaatgcacgaccccatctggcggcgaagccctggacctagccttctgatcactcatgggaaccatgaccacgtgtcacatagtagaaaggaaaacttggacaacttactgtgtagacaggagcagcaacaacaaaaaagacttggaaggcttaaagaatattttccaagtatacacaaatacagagaataataagaggaatgactttgagagcctgaggcaggaggattgcttgagcccaggagttcaagaacagtctgggtagcatagagtgaccttgtctctacaaaaaaattaaaaaaaaaagccaggtgtggtgacgcgcaccagtggtcccacctccgtgggaggcagaggcaagaggatcacttgagcctgggaagttgaggctgcagtgagccatgattataccactgcattccatcctggctaacagaccaagactctgtttaagaaaaaaggagtatctggggtacctgctatccagtttaagacatgtacaaatatgattcagccttccatgagcatgcctccccagccacccctgtgaaacccagtaaattgaatttactgtttgttttttggaggcatgttttatttttacactgcatgtatgcctaaatgatatatcccattgttatgatattttcaaactttgtagaaatgataccttactgtgttcctacaacttgaattttcattaactgagacattttacatgtatttatcttcttagcaatcctgagaaaagcaagagtcactatctccattgtatagatagagaaactgataatgtagagcaatgatgtgatttttgctaatttcaagcagctaatggagatcgactcacatttgtaccttcagagccctagtccatgctctttgtatgacataaatgtcaagattcatcaggaaaaggaagaacaggcgggtcttgttggttactctgtgaccctgttgcttccctgggacctggaagtcctggtgtctcccttagcctggaatcccagtctccatctgggttttgcaggctccaggagttttgatgaaatgaggacccatatggctggttgagactcccaccccctcatcactccctaccagcgtttgtgcagaatcctcctctcctcccgagttggaaataatgtatagttggctcaaaagtcagcccctccttattttagcaccagatgctgcctctcagcttcacgctgccctccagcagcattgcctgtggtccatgggatcttggccttcacactcagcattgaaacagctgccttccgctcccatcataggaaagagaacagaagtctcttgctcccactccccccgccccaccccctgctgctggcctatttctgtgctttgttttgctgtagaacttctggaaagagttgtctgcagtggctttctccatttcctcccttcccgttctctcttatacccgctccagtcggacttttgccccttccacagacacctctcctgacacttttgaccccatcacttagagatcaagatctgtaagactccaagtctccagatccagtggtcagctctcggtcccttcccatgtgactgaccagcagtgtttgccacagtcgtcccctctaggaaacaccttcttcccttggcttgtggggcactctgtgcttgggattttcttcctgcttcactggactttgctcagtccccttactgacccgtgagtgtcagagtgtccctgcggtcagtccatgcccctcttctccgctcggtccacactcccaccatggttgacctcattccgacttgtggcacaaggagctcacatttatcttttagctctgatttctcttctgacctccagactgtacaccctgttgctcacccagcgctttcccttagagttctaattgacgtccccacacaacaggcaccaagctgtccctggccatctcaaccccaatctccacatctcagtaaatggcagctccatgcttccggacacctagaccatagacttggagccaaccttgactcctgtctctcttaaaccccacatggaatctgttccgtaagctgcccatggtcacaccggcaccgctgccgtgcgatgagagcctgtcatctccttgctagattgctgtgccagtttcctgatggttcctgtttccacactgactgcataccttcccacccaagtctgtgtctgctcagcagctggtttattgcatacaaacttaaatgagaatgctcctccgaccagagctctccgttccctggccatcccattaagagtaaatgctggaagcccctcctcaactgactttatttcttaaaactctatcctgcaaaatcctgcctggctaataactttatcaccttcttcgtgttggttccaacgttcccttctgcaggtggcttctgcggactttggtactggcccacatccctgagctggtaaccccccaccatgcacaggcacccccacattaattctgtagcttatttgtttattgttgtctgtgccactccagacaggaagcctgtgggggttgggggcttggtctgccttcttcagccctgggctcacagtcctgacatcttcttgaagacggcgctcacggtcaggctgcagcaaattcacagttgacatctaggagtgagggcctcctgccatgctgcactctggcctctcacctgcctcctgctagtcctgggcacacctggaggacaatcagggaatttctttccccatctgctttggcatcctccaaacctgggaacctttctaacacctgactgcttggtgaccatgtgtgtgctctgtggatttctgtccaggagggtccctcactctggccctcagggccatgtgcatgtggacaccgactggtagggttggtttcctatgcagagagcagggccagaggcatagccggcccacccccagccccattgctcacggttcacccagtcccctggcctttccgacgctgtgcgcatctgtatttgttgcagtgaacagagcctagaattataggactttgtcagacagtttgattttcaaccccgtaaaaaatacattttacttaaccacctaggatacctctacattatagacctcaagcagaagtttcaggagacagtttcttactctcattagaggtgatgcgttttgtgtggtcttcggtttcattgccccataaactcacttggcgatctgcctgtgggtccccagcagtctgtaagccacagctttctcaaccgtacttcctgttctggaggagaaacctgagctgcaaagagctaagggtcttgctaaggtcataccagtgaattcaccaaacagccagtactggaaccctgtcctctgattcccatcctgtggcttttttaggcttgtgtaatcaattttaatgattgtaccattgtagcttatttaaattaccccaggaggaacatcagctctgttcaagaaatgttattgtagttgctcacctgctttgttcagggaaatgcatcttttgtgggatttcttctgagtaattaagagggtctaagaagccagttttatagtcatttatttaactgtagagaacaatgaagttaaacacaaaagctggttccatctgcaggaacatatgagtgatttgcattagaaagggtgttcatcaaagctcctcccaggtgcctagggaggcatggggggccttggtgggttccctgagggtcgggccaaggccttgggccagggagcacagttccattgcactgggtgtgttggggcagaaccttgtgcttggaggtaggtgttgcttctggccctcggttgcttgctcctgcaggcagggccgtggacccgtagctcagcaaccatggaggagctgtgagaaatgcacagtctcaggccccaccctggctctgctgacttggaacctgcatgttaacgagactgggggtttgtatgcacatcacatccggtccagctctggcctgaggactccggtctgtggtttctagtttttatcatccagctggtcatcctcagcagtagagaatgtggttggttaccatgtgcagggcagcctgctatgtgctgtggtaacagaagggtggggcagagccctcctagccctcccagccctctggggcttgctgtctctagggcaggcaggggctggcatatgcagttgtacaccatggtgttttacaaagcacgagtgccatggaccccatgggtgggctggattgagatgcaaggagggaaaacagatggggtggggtcccaagcaggaggaactgcatgaggaaaggcgtggaggctggacagatgcagaggcagtcagggaatagccagtgtcagaatggagcaggcgacagccgggttttggaggctttcagtcccacgtttagatatttggactttatccagtgggtcatggaagctactataaactttttaaaattaaatactattttatttaaaaaattgtgtaaaatacacataacataggattcaccttctggaaccatgtttaagtgtagagctcagtcgcattaagtacatttacacggttgtgcaaccatcaccccatccacctccagagctctcctcaccctgcaaaactgaaactctgtccccattaaacacttaactcccattcctcctcccctcaccccctggcacccaccattgtactttctgtctatgattttgacgacttcaggtgcctcgtatgagagcaattgtataggatttatattttgtgactggcatatttcactctcaacgtcctcacggtgcacacacgtcgtagtgtagcacgtgtcacagtctccttgtctgttaaggtcgaggaatacttccttgtatgaatagaccacattttgttgatcgttcatctggtgaaggatgcttgggttgcttttacctcttggctgttgtgaatcatgctgctgtgaacatgggggtacaatctctttgagctcttgttttctttttctttttttttctttttcttttgagatggagtctcgttctgtcacccaggctggagtgcagtggtgcaatctcagctcactgcaagctccgcctcccgggttcacgccattctcctgcctcagcctcccgagtagctgggactacaggcgcccgccaccgtgcctggctaatttttttaagtatttttagtagagacggggtttcactgtgttagccacgatggtctcaatctcctgacctcgtgatccgcccgcctcggcctcccaaagtgctgggattgattacaggcgtgagctactgcgcccggcctgagctcttgttttcacttccttcgggcatacccccagaagtggagtcattcctagatcatatggtgattctatttttaatgttttaaggatagcattttccaaaggggctgcacaccattttacattcctacccaccgtgtacaagggttccagttttctccacatcctcaccaacacttgttattttctggtttttcaatcgtggccaccctgatgggagtggggtagcagctctctgtggtttggatggcgttttcctgatgcacgatggtgtggagcacctctcctgtgtgggagcactgtggcctggtgagcaggggctctgtggtggggaggcgcgtgccgagggctgtaggagagggcgacgggtggtgctgtgcatcaggttcggggtgatgggaacgctgtctcttgcacctgcacatcaggcctcccccatgctactttggtggcttctgtgggagcacaatatgtccagggtgccatccccaaggcagaagggagcaccatctggtttgatgtgtggcctgtacttcaccaagcccaccacatttggcctatgactgtgtcctgctgcgactgggttgaagtcagaggagccgagacaggcgggggagcatttggaggacgtgtcccttgctgtggtgtctttgcagaagtggccagcacttgcactgcccagtagtattttcgatgctcctgggaacatgagaggattgcactctctgctttctcaaagttagataagaccatgtgccttgcttcagccaatgacatgtaagcagaagtgacttgtgggtagaagctggaagggactttctatgctgtcctttctccagtcacatcggtcctagaagcacatgcctaggaggaggggccataatagcaacgtggctgttatttgctttggactcacagtggactttgagtgagcaagacagaaaccattactgggcccaggccctgtggcgtgggagctgtttgttgtcacagcacagcctagcctgtcctcactgatccaggaggaacctgaaaagtattttaagtgcacagataggtgaagatgaaagtgtagcgttttgggataattctgcatgcttcttagtatctccagcagtttcgagatttggcgaaggggctgaacttttctgtaggtaaatctcttgctgaagagttcattatcagctggtaatggcttcattttgtcagcggcacagagctctggcttgtgcgtgtctgaggcctgtccccactggggcagggaggtaatgagaactcatgaaccctgcatctctgcctggctttaacagcctctgtgttttccagtgcttatcaaatccagagctgtttacatttcaggagacaacttcagactctgtggacctcattatacttccaaagcaggagggtcgttgtttttaagcattattcccaacttttttttttttgactgcagaaatgcctttttaatatcagaaaatttccaagttttccttacttggctatagtcttgtttttagtactgctttggtggttcagtaactattcattaaacaaatctcttcattttaagtttatttcttctatagggctcttctcttctcttctgttctcttctcttctttttgatacagaatctccctctgtcgccaggctggagtgcagtggtgcgaccttggttcactgcaacctccacctcctgggttaaagctattctcctgcctcagtctcccgagtagctgggactgcaggtgcatgccgccatgcccagctaatttttgtatttttagtggagacggggtttcaccatgttggccaggacggtcttgatctcttgacctcatgatccacctgcctcggcctcccaaagtgctgggattacaggcatgagcctccgcattcaaatatatgtaaaaacggagagaattgtgatccctgaaaattcatgtgttgaaatcttcacccccaggacctcagaatgtgactgtatttggagagagggtctttgaagaggtaactgagttaaaatgatatcatcaaggtagcttaatccaatctgactgatgttcttgtaagaagagattcagacacagacaggcacagacggatggccgtgtacatacatggcggaagacagccgtatgtgagccaaggagcgaggcctcctgagaaaccagccctgctgacaccataatctcgacttccagtcgccagaactggaagaaaatacatttctgttggttaagtcccctagcctgtggtactttgtgatagcattcctagaaaactaatacagtgcctgtgtgctattgttcagtgtcagcagttccagtttttaagcaatcttcatggactgctcccgaagttcagggagcatggggcctatagcagagaactaggcagcacctgcccttgtgaaactgacactctacggaaactggaaaaattcatgaggacaagcttcagttaacaacactttgaggctgggtgtgggagcttgagcctgtaatcccagcacttcgggaggccgaggcaggtggatcacttgaacccaggaatttgagagcagcctgggcaacatggtgaaacgccatctctactaaaaatacaaacaattagctgggcctggtggcagttgcctgtggtcccagctacttgggaggctgaggtgggaggattgcttgagcccaggaggcggaggttacagtgagctgagattgcaccactgcacttcagtcagcccaggtgacagagtgagaccttgtttcaaaaaaaaaaaaaaaaaaaagacactttgagactgggcgaagtggctcgtgcctgtaatcccagcagttcaggaagcagaggcaggagtactgcttgaggccaggagttcaaaaccagcctgagcaacacagcaagacccctgtctccacaaaaaatatattaaaattagctgggtgtggtggtggatgcctgtagtcccagctacttagaggctgaggcaggaggattgcctgagcctgagaggttgaggctgcagtaagctatgatcatgccactgtattccagtctgggtgataaagcaagaccttgtctcaaaaaaaaaaaaaagagcactttgaattctcataatcataatcatatgacatctgtctaccttagaaaccctcgctggtgggtggtcacacataatgctggtggtctgcggggggcagatggactctcacaccctcctaggttcccctttaggaactgaggcttcaggtatgggaagggtttgtggaataaatggatgaaaatggaatgagaagctttgcccacgtcagagccaacctatcatgtggaccaggattcagaccacccctgggagaggaaccaggatgcacccatcattctttttttttttttttttgagacggagtgtcacactgtcacccaggctggagtgcagtggtgtgatctcggctcgccgcaacctccgcctcccaggttcaaatgattctcctgcctcagcctcccgagtagctgggattacaggcgtgcaccaccatgcctggctaattttgtatttttagtagagacagggtttctccatgttggtcaggctggtctcgaactcccgacctcaggtgattcacctgcctcagcctcccagagtgctgggattacaggcgtgagccaccgcacctagccgacacccatcattcttacacagtgaagacccagggagatgatgagtcacaccgggaagtgattcatttgcttactgttaagttcatccaggattcctttaaataccaaatccccatatacgcttaaaaatacctagttcactcagaaacagtgtgctgactgacggaagccagacatgaaagactatgtggtgcaattccatgtataggacgtttctagaaagggcctaatgacagagatggaaagcagatgagggcctgcttgggtctggggcgtcagtggggattggctgcaggcagccatgaggagccttcagggtgatgagggttctaaaagtgcgtcgtgtgcctgagccactgcgacattcactagaagtcctccgtgctgacggagggtgaactgtgtggggcccaagttctatctcaggaaagccagggaagccactcagttcagctttgtgaaaatcaagggagtcttcttggaggaagtggactctgagctggatgtgaatgacggagtgtctttggtaaggagagacagctgcaggggactcctggtggaggaacaggatcccgggggagcggccgggcgggtgactgaggcgccaatggaaggagaagcctgtcacaggtgagggcattgaagggaactgcagggacacccagcgcttctcaactctgactgcagatttccagctgccatttctaaaggacaggtgcctgggctccactcctggaggtttggatttaatcagtctcgggtatagatcccggacgttagtatttttaagcatatttttaaatgaagtgatactctaattctatcattttctttttacttctcagcttgttgcttctctaaagagatacctccctttatccattttgtggtcacccagtgggacagttgagagagaaaaggccgggtggcatgtgattcttctacttcatttaccagttttgaagatgatgaatttgtttcccatgaccttccaaaggtggttttttaaaatttattttaatctatcgtcgtgaactcctggggcgtgaacgtgtgtcataggtttcaaaccactgcaatcattatcctcattgaggttcattgtggctggtggtagtgtcttcatattggcctctgagaccttctgacctgattctagttatctttgataatttccttgtctttaaaaaattataattgtatatattttttaataataaagatgggtttcggctgggcgcggtggctcacgcctgtaatcccagcactttgggatgcagaggtgggcagttcacgaggtcaggagattgagaccatcctggccaacatggtgaaaccccatctctactaaaaatacaaaattaactgggcatggtggcgggcgcctgtagtcccagctactcaggaggctgaggcaggggaatcgcttgaacccaggaggcggaggttacagtgagcagagatcgcgccactgcactccagcctggcgacagtgagactccgtctcaaaaaataataataatagtaataataataataaagacagattttgccatgttgcccaggcttgtctcgaactcctgggctcaagccatctgcccacctctgcctcccaaaatgctgggattacagtgtgagccaccatggcccagcctaacttccttgccttttaagagtaaagcagttttatttcccattgctcttccactagctttaagtatgtgttaatttattattttaggttgtcctagaggttatgatctgcagactcattagatgctagtgatgctggtcttctttaaattggtactttaaccgcttcctggacaaggcagggactttgcatacagatatatcagtatggtgtggaagacagctacactcaccattataccacctgcacagatatcagtatgttttgaaagttgcctggagaccttggtggcaatccagggctgaaaactctgggtggggcactaggtgggtggcaggtgcactggggactgaatgggatgctgtggcagagaggaccagacctaaagcctttagtgaagaaggcctggtgtgaattttttagctggttatcaggttcatattttaaagaatatttttctaattacgtttgtttgtttggtctggcctgatgtgggacgtggtattttcagtgtataggtcttcctagagttgggaaggagggatgcccttctgttggagatgtttctgttaactcaggtgctttaggaatggaaaggaaagtcatgcagctcaggcccggcaggggcattgttgaagatcctcagccagtgaggcgccttccctgtgcccagcacattgctgaggaccttgcctgaaagatgtcctttcatcctccccacccacctgaaagatgagaagtggaggactgatgagaaccttccagatgggttctccaagccacacagctaacaggtgccagagtcggaatttgaactcagctgtgacttacttctgttaccagcagaagtgggtgagaaagccggccacagtccactaaacacgggctatgaccaaggtctctttgacaacataatccaacaaataggcttgttttagaatataaatctcaaggaatttggggggagttgatatactcttgttttttactttttattttgaaatatttttagattcacaggaggttgcaaagaaatattcaagaagatcctgaacactcttcacttagccccgcttcaatgttaacattatgcataacgatagtacaatagtcaaaccaggaaactgacagtgatgtagtcaacagaaactagtcagactccagtagttataatgtatgtatgtgtgtgtgtatgtgtgtgattctgtccaattgcatgtgcaacttcatgtaaccaccaccacaatcaagatatttaattgtatcatcagcaaaggactgcctcatgctaccccattgtagccacatgcacagtccctcttccatcattcctaacctatggcaaccactggaggacatttggagtttccagtttggggctgttatgaacccagatctgctatatgaacattcacttacaagtttctatgtgaaaacaagtttttattcctctatgatcaattatctacaattgctggattgcatggtaaattcatttttacttttaaaggagttgccaaactattttccagagtggctgtaccattttatattcccattagcaatgtatggatgattcagtttctccacatccttgccagcatttggtgttatcactgttttttattttagctattctcataggtgtgtagtgatatctagttgtggtttagattgcatttttctgatgcctaataatgttggggatcttttcatatgattatttgccatctgtgtatcttcacgggtgaaatatctgttcatcacttttgctcattttttttttttttttgagacgaagtcttgctcttgtcttccaggctgtagtgcagtggcacgaacttggctcactgcaacctccgcctcctagattcaagtgattctcctgcctcagcctcccgagtagctgggattacaggcgcctgccaccacgcctggctaatttttgtatttttagtagagatggggtttcaccatgttggccaggctggtcttgaactcctgacctcaggtgatcagcccacctcggcctccgaaagtgctgggattacaggcatgagccaccgcacctggcccacttttgctcattttctaattagattttttttttaattgttgagttttaagggctgtttatatattctagatacaagtcctttgttaggtacgtgatttgcaaataatttctcccagagtataatttttttttctgttatcttaacttgacccttgacagaatgaaagtttttaattttgaggaggtcaaagttttatcaaattttttccttttatggatattgtgtttggtgtatgtctaggaactctttgcctaatcattaaggtcccaaagctctttcctttgattttttttttctacatgtcttatagttttatatttaagtccttgattcattttgcgttagtttttgtataaggtatgaaatttatgtcaaatttcttttttctttttttgcctatagatgtgcaaatactccagcgccattaattgaaaaggctgtccctccttcatggaattacttttgctccttgtgacaaatcagttgggcatatttgtagggatcatttttcctgggctctctactccattccatttgatctctgtgtctctccctttgcctatatcacactgtcttgattactatatctctgtaggaagccttaatatcaggcagggtgatttccccaattttattctcctttttcaaagttatttggctattctcaggcttttctctttctaataaattttagaataagtttgtttgcatctacaaaataccttacaaagtttgacaggacttttgttaagcctgtcagtcaatttaggcagaatcgaccttttaactatgttgagcgttccagtccatgagtatgtctcttcagtatttaggtctttgatttccttccttgtcattttgtaatttttattttatatagatcctgtacatattttgttagatatattcataagtatcttcttgttatctttagagcaactttaaatggtgttgcatttaacagtcttgatttccacttctttgttattagtgtatagacatgcaatcagtttttgaatgttgatcttgtaccctgaaaccttactgaactatatgttttcctctcagcactgtctgagctgcatcctaccaacttggtatgtcgtgttgtcattttagtgcagttctatatagtttaaaatttcccttgagatttcccctttgacctatggattagttagaagtgtgttggttaatttccaagtatttggagattttcctgtagtttttttgtcattgatttctagttggagtccattttggtcaacatattctgcatgattttaatttttttgaatttattaaggcttttttttgtgacccaggatatggtctatctgagtgtatgttccatggacaattgaaaagaatgtgtattctgcagtttttgggttgaattttctataaatgtcaatttgatctttttgttggatggtgttgcacacttctgtatctttgctgatcttctgtccagtagttgtgtcagttgctcagagtgggtactgacatccccaaatattattgtgaatttgtcgatttttctcttggcaagatttgtttttgctgtatgtgttttgtggtctggggggtacgcatttagaatttctgtatgttcttggtaggctgggcattttattattatgtaatattattccttgtctttatttagtttctttactctgaagtctgcctggatattaatatagccacttttgctttctcatgattagtgttggcatgacatgtcttttcccatcctttactttcagtctacccatgttgttatgtttgaaatgagtttcttgtaggtagcttgtaggttattttttaaatccattctgccaatgtctgttatttgatgtagttagaccatttatatttaaaatgattattgacttgctagggtttaagtctgcattttatgatttttttccttctctttctcattcctctgtttctttttccttgccttcctatggtgacaaacattttttagagtcccacatttccttatttatactgtgtttgaatgtacggctttggatagtgttctttatgattgctgtaaatattatgtcagcctactggtgtcagagttttaccactttggaccctttaccctcactactttttaaatataattgtcttaagtatttcctccgtatccactgagtaccttatcgtatgacataataacttttgcttcaacttaaagtatgattaaagaacctcatgaggtgaaggacagtctagtcttcttctgttagtctctttttctgtttgaagacatttctttagcccttctttaaaggttggtctgctagtaataaattctttagcttctcttctcctgagaatatcttaatttctccttcatttcttttttttgatagcaaatttattgagtcataattcacataccatgtaactcatacctttaaactgtacaattcagtggtttttagtgtattcacagagttttgaatcataaccacaatctaatgtaataaaattgtaagtctggctttttgcatgtgatagaggggagaaggaaaagcagtctatatcatcttgctctggaactagaagttgatagtcttttcaagtgttttataaatttcaggttcctctctccatccctttatttttatttatttatttattttgagatggagtctcgctctgtcacctaggctggagtgcagtggcacgatcttggcccactgcaagctccgcctcccgggttcacaccattctcctgcctcagcctcccaagtagctgggactacagacacctgccaccacgcccggctaattttttgtatttttagtagagatggggtttcaccgtgttagccaggatggtctcgatctcctaacctcatgatccacccgcctcggcctcccaaagtgctaggattataggtgtgagcctccgcgcccggcccctttctttatttttaaaatgtattttaatttttagttcttaattgtggcaagagatacatacaaatgtatcatcttaagcattgtttaggtgtacaggtcagtgacgttaaggacattgacattgttgtccagctatcaccaccactcatctccagaatgatttcatcttcccaaaatttaacctctgcactcattaagcagtaattgtccattcccctcttttcacaccccctggcaaccaccattctactttctggctgtgaatttgactcttccaggtacctcacgtaagtggaatcctacaatatttttgtgcgtgactgacttctttcccttagcatagtgttctcgcaacgttgtagtaagtgtcagaattcccttgcctgtgaaggctgaataatactccaccgtatgtgtagaccacattttgtttatccattcatccatgatggacacttgggttgtttccacgttttggggactgtgaataatgttgctatgagcatgagtgtgcaaataatctcttggagatagaccctgcttttcattcttttgggtgtatactcagaagtgggattgctgaatgatgtggtaatttatgtttttaattttggggggaactgctatactatctgtccctgtcttttccttacaaacacgtgtggaagactttgaggcatttgacctgtggaacatctcccttcttattttggatgggtgcactcctggtgaagttcagcgtgtccctttgtcctctctctcctgcacattggcagctggatccagtacctttgctggacttggttccgtctctttcgcaggattagaggaagtgctctatgtctgttcacccatctttttgtgagcaggcagctgttgatgctcaatgcccctgttttgggtaaaattgtgtctccccaaaattcatttgttgaagtcttaagctccagcatctcagaacctgcccttatttggagaaatggtctttacagagcttatcaaagcaaaatgaggtcattagggcaggccctaatccagcatgcccagcgtacttccaagaagaggaaatgcggaagcagacacgtgcagagggaggatgggaagatgtggtgactccatataaacataaacacggctgtctcttgcccttcattcttgaacgctttgctggacaggaaatccttgagtgtcttaaataggctactctttttttttctggaggtaatcatggttgtcaaaaagtcttaagggtcagccacagtggctcacccctgtaatgccagcactctcggaagtcaaggcaggaggatcatcggagctcaggagttagagatcagtctgcgcaacatagggagaccctgtctacaaaaaccttacctttcatttctttttctttctttctttctttctttctttctttctttctttctttctttctttcttttttttattttttatttttgagacagtctctctctgccggccaggctggatccagtggcacaatctcggctcactgcaacctccgtctcgcgggctcaagcgattctcctgcctcagcctcacaagtagctgggattacatgcatgcaccaccaagcctggctaatttttgtgtttttagtagagatggggtttcacctataggccaggctggtctcgaactcctgacctcaggtaatctgcccaccttggcctcccaaagtgctgggattacaggtgtgagccactgcaccgggccttaacctttcatttcaaataaaaaggagataacctggaattctgtgtgggctctcagtgtaaagatagaaggacacacagagtgttttgaaacatgcccctccctgatcagcaggtgtcctgctgtgtcacatgtgactgtcagttcccgacccctcggccgagcagaaagggctttggcaaggtgtccggagttggaggtggcctctgggaggtttgctgcccgagggtcctgttgccgccaggactggtgaggagactgaggattgaaggggccaaaagctgacaaaattctgtgcgggggctgagtggcagattcgggtctgaatcatttcctggttcctggaatattcccacttaggtgccgaagccagaattggagggagcgtggcgcctactcatggagcctgccaaggcactgccagctgctcacaggccaggccgggcgggcagagcctcctcgctgcctgctggctttgaaattcatgtttgagacacacattccagccttcactgcttgttcaaggtgatacatgattttcagactggacagcttggcctcttgtctgttcttgtgttttcctttatgtaccaggataatgttaaacccttcccatgatgctgcaaaaaccaaatagtgcagcacacaccccacagcccgaaacaactgcaggtgcgtgtgccagtggttctgaaaggaatacagagacgtgtggtttccgaatccgctgattgttttattatatactgttacagatcatgttattctaaattacaaaataaaacttatgttaatatacatttatacaacgtatatattatacattatatagcatgtagtgatgtatgatgtaatgtatgatatgtactatataataatttataatatattataattattataataaaaatgactggccaggcaccgtggttcatgcttgtcatctcagccctttgggaggccgaggcaggagggttgcttgaggtcaggagtctgagaccagcctggggccacatagtgagaccctgtctttctaaaaaaaaaaaaaaaaatagtaatttgttattattcttcctattactatttttaagggacaattttggaaacatactttactttttctagtgtagcaaagaatttacattttgtcacctgaaagcgtcctggaaaatccatcctagtgtcttgtaattctaacagtcaccaggaaggctactttgagaaaatttcatatggtatgagggaaaacaagaacattctcatttttttttgtcttgctgaattaaaaaaaaaaaataaaagcaacaacaagaaaaaacaaagcccagggctggggttaagtaggtgaaggaggaaagggagtccccacctgccagtctcagtgccgctctttgccatgcacacacccgtatgtgtgcccatgtgtgtgcacacagacaccaccgggtccccttggagttaccaggcaaatgcatgtcatcagctgttgtgccttgatgtctcctaagctacatagaatcccctcagaccacgcctgacacccaggacaccagggcagtaatccgcacgcccatttcactctcaccatgtaaattgcgttttctattttcatttcattttatgtcacttttcttcaacaagtaattattctagggctttataagaacgctgtgctttcttagtctatttataatgagtaagaagttgtttttattctatttcttttctgtctgtgcttgccattttttttaatcacgattggataaggggggatccctgcaagataacagcgcccaccaaattagaatctccctgaaaaacatacagttaatcaggaggaaaatatagttgcccatagtccatgattatagcacaactaggggacaattaatgtagcaaacctctgtttccacccaagaccaggatacagggtttcagggccaggccagagccccgagccatcaggaccgggcacaggagagtgcagcagcggcctggtcccaccctcactcgggagataataagagacatctgaaatgtcactcaggaataaaagagagggtcttggaaagtgcatgggatgggagagtctgctcctgggagatgtttcctggaggtttggtgtgaaagggaagagaagaattagctgaaaataaggaacttagtaaaacaacaaatcatccacaaagaagagctcctctcaggggaggaggaggtggaagaagaggaaaatctctctccttaattaaaaaaactgtactttagagaagtaagagaagagtgcatggctgaaccatgttcctgagcaagccacacagacctctccctccctactgactctactcatcagcttttggggagtctaagtaaattaatataaacccaagcacacctagcgtccatacaatattactgtaagaaaaagaaatagaaaatgtgtagcaaaatgctggacatgaaaacagccaagaagcacaaatgaaatgtaagtaataggcaattgcaaatgtgaaaaaacaccatgagccagctcttcataaaataagactggaaatggataaacaacgggagatatgaaatgagagctaattaaggaaagcaaatgaagaaaagtctaagataatctctgaaattaatagtaaatgataaggttccccaaagggatagtagttacagctgaaagcacagtagggatagaaatgaaagaaatagaaaagatcaaaaccaaagtgtctgttggaaagacatccaatttacctgtaattggtgaccctgaagaactaaaacaaggcaatggaacagaactaaaaatttaaaactgcaagtcaagaaaactttcctaaaataaaattaagacccaaatctacatggaaatatagtccactgccattccgggaatggttgactcaagatttatgctctaggaagactaaattctaaagataaagagaatatcagcagggcctccaggcaaaaggaccaagttatttacaaaggaaatttacagagttgtttacaaagttacaagttatatgcaaagtctggtgtcagacttataacaacaacaaagaaagcaagacagcaatgcacaatacttttaagaaactcaaggaaagaaaacgtgagtgaaggattttatgcccagccaatggttctttaagtgattcagaaacaaaaatattgtgcccaccaggcacacttaaagaatcagctggcattagtgatatgtcagaggctggacggcagaaatggtctgccctggttgcaggcaatgaggagtttcatcatctgtcgataatttaaaaacaataataaaactgactgaaagtccgtctgctttttatgtcactgtgatccaacacttttaaacaatgtcagccaaaaaatactcctcctgaaaaaacctattgttggtctaatttctaagcaatttttcctattacaattgcattttaatgctatgtgtaaacctcaaattagcatatttgcattacttatgctttaataaacattatattctacatggcatttaatttggagaactcccaagtatacgatcagcccctgacatctgcagactgaggcacatgtgtttattttgagaggaagtttgtagcaatccagaatcatgcaaactccattgaggtccggactcctgtgaccctgtgtattcctctgtttggatagcagattaggaataaccagtgatatcacaataggtaaagacaaagaaacagaacttggatttcttcaattctgtcattctatgtgaacactagaggtttttattggtgtgtaaaatttgaagagtaagagcacagatgatgagattggatatttttgtttgattggtgcaacttgtagttgacacatgaaatattttactgaatatgagctgtaccattaggactgaaattcatcttttaaaattgtccatggtttttaaaattacagatccagttaaggaaatagtgattattactggttattatgtgataattactgaaaacactgttgtcacatagaggatgaaggtgttaaaaattagccacattatgtatgccacatagcaggggacaggcttcatccaatgaaaagatgatgtgggaaactttggcgaaggcactgatagtatttttacacttaaacaagtattttaaaatgtttaaaaaaaattgtatatgtatgaccgaaagaaaggtagggataagtatggaggaatggctataaatgttatatattctgacaaaatagaaataatgaataaaaataatagttggagtaggaagagcaaaagaggaacagagaatcagctcattgattgccctgcaggtaggaaagtggtaacattgtttggtatacaagaatgaccactgaaacaaaaatatagaccttaaatacccaaagaaatgcaaaaacaaaacaaaacaacttttaaagaagcaaacaaaccatatagtgaaatacacacggtcaatataacactaaagaatagaactgagaccaaacctagcagccgcatcagtaaattagagtggatttaacccatttattaaaaggcaagactgattttcagattggttcacatagtggcacccaactctatgctgtataaagaagtcatatccaaaacacagtgatccaggaaggctgaaaatgacaggagggtgtatagcaatgaagagagaaaaagagcttgggagttttaatcctgactgcagccaagctagtatcaggccaaaagcattaatggaaacaaagagggccgctgtcaatgctaaaggctgcaatttgcagagaagatacactaggtgtggttatgtctgcttcacataacatcaccagaacctctacgatgcggaaaccacaggggcggtggggagacatgagggacacgcagttccaggacattgtgactgccttgctcagcctgagacatgtgaaggggaccaaaacatacgcctccaaatgtaccagactttgtgctgtgataatagggaatacaactttgtttcgagactacttggaacacttaggaaagttgacatatattagcttacaaagacaacctcaatgagttccgtaacagaaataatacaaacaacattctgtgctcacaatgcaataaaactaaaaattaatcataagattaaaaaccaaaaaggcccttcaatttgaagagttacaagattaaactctattaaataagtttttaggtgaaaggaaatacacaaaccaagtgcataatttttgaatttgacgataattaaaatatatcactctgtggaatacacataaagctgtggttataacctcagaaatgaaaccaaacgaattaatggatttatcatctaactaaaaatgatagataaaaatagccaaataaacttagagtagaatgacaaaaaataagagtaagattggaaattcatgagttttaggaatgagaaaaaaatgaaactgataaatacacaaaatactacatcctagaaaaagaatcaagtggacaaacctctgtctaagctaatcatgaaggggagagagagagaccccaaacaacacagaataagaaatgacattaacagaacagagcatatttaaaaaaatcattaaaagcttactttgtatagtgctttgcaagtaagtgtgaagacctggatagaaagggaacttctttaggaaaatataatttattcagattgaccccagtagacacagaaagttttaaaaaaaaattcctactggaaaaaaattcaaatctatattttcacaggagaattctatcaaatcttcaaagaacagatatctcaatgctacttaaattattctagaacatagaaaaagaaaccttaagattattcaatgagaaaaccacacaccaatctcacttaggaatattgatgtaaaatgcctaagtaaaacagtattagagagaaccctttaaaaatggttttgagacaactggatagccatttggaaaaagataaaattttgtcgatatctttcatcatctacaagcatacatttcaaatgtctctaaataggtagttaccagaaaaactaccacaagaaaacatgggtaaattttaaaataacctgtgggtagggaaaattatgattcaaaatccaaaagcaatgtaaaaaagattgagaaatttggttgcattaggaaaaaaacaaaacaaaactgctttcgcatgatgggggagggacaccataagcaaagtgaaaaagccaggtaataaaccagtagaaaatatttgcatcttatatcacaaagctaattccttcaaaatatagattataacaagataccatttctcatgggccatattggcagagaggaaaaaactcaaaacaaaacaatacaagtttgatggcgccctctattggcgaggctgtggagcagccattcagattgctccacccctggaggaaacaggatgccttgggacttggtgcacctgcatagaccctgactcagccatgcctccttcctgaatttacctggaagacaatactccaaatccaaacatgctcatggcatatggagatcttaaattaataggtcctcttttatgtctttcaataaagtaacagatatgtttctatagaggtcttccatttttacattaaattgattcccaggtatgaaattttggctactgtcccagtggcagccctctggaaatgacctttgttgagtttgtgttttgacctggtatccagcaaccttgcttaacagtctgaagagcagcttggggcttttctctatggacagtatgtctcctgcatgtaatgacagttggctttcattcatccattgcaatcttcatcctttaatttctttttgttttcttacttctgtggttgggagtgacagaacagtgttaagcagaagcagttatactgcaaattcttgtcttattccttcttgtagggccatctctaatggtccaccatgaggtgtggagtttgctgtggacttgtggtagatcctcactttgttaaggaagtctccttctggtcctaatttgctaggagttttttctccctttaattgtgaatgcatgttgaactttatgaaatggtttttgggcatcaattgagatgatctgttaatgtgatgaattatgtgattgcgacaatagcttttctaatattacaccaagttgacatgcctgggataaacctgtatttcatcatgatatgtctcttaaaaattgctgggttcacttggctaatactttatttaggatgttttttcacctgtttataaatgagtttggcctataatttacctttcttattctgcctttcattggttttagtgtggagattatattagacccataacattcagcatctcatccttttctcttttggagagcaattaatataagactgaggtgatatgttcctcaatggtattgttaaaacttacctgtgacaccttctggttccagtgcattactagtggccagatttcaagtgactaattaaatttccttaacatttaaagtctattcacaatgaggaaataaaccttacctcatcagttggcttccttcaacactaccatttttcttctttcttgtgagtatgtgagccttagttcaggctgctataacaaaaatatcatagattagtttagagaacacacattcattcctcacagttctgaaggctgggaagtctaacgtcaaggggctggtgattcctggtgagggccctctgcttggtttgcagatggctgccttcttcctgtgctctcacatcggggagagagagagcatctctctcgtgacttttcttctcattcccattcatgagggcctaatttcttcccaaaggccccacattataatagcatcacattaaggattaggcttcaacctctgaatttgggaggagcacattcagcccttagcagaaccccacccccaagattttcctaagtgaatgaatagtcatcccccagccttgttcctggcctctaacagcattttagaaggaggtttctcatgactggggttggctgagatgggaatttcctgattccattggctgtgattcagccccatgccatcctgccagtaagatgaacacatgagtcatgctcagctgctagggtgcctggtgctgcttccagttcctctgggtgacctctgtccagcacataaacctcctgaagcattccgaatttgcggaaagtgagccaccctcccaatgtgtacatgtctgggcctaccttcctgctctcgtatgtgacaggcacacagcctttccagaaggtacctcattgcctagtacagaaatgctgaggttctcacaggagtgagaaccctactgactggctgttgtgtctctcccatacagtcgggtgtggagcagttggacccacatacctatctgcgcccatcctcagttgaaaggtagtgaacagcttgggctgtggactcaggcaggcctcggttcaaatcccagctctgccactcaggggctgtgtgtgcagataggctgcatctattgtccaaagccaaacatggggaaaaccaaacaatctctcaaaggggtgtggtgagggcttaggcaaaagactggtgtaccgtggctcggatggattagtttccattctccctctctctgtttccagctttcctctcactacaagatgagggccctgtccctcttgggcgtttgccaaaggaaggtctggacacccagcagctcattcatgtcgcttcccagtttgctgttaccatgttgcagtgcagaagccataagccgcatgatccgtgagcctggccctgcaacttggctcctccacacagcagcgtttgccttcattgtcacagatgactatgagaagatgcccttggtcatctttggtctgggctctggagttctgtagagctttgagccgccagagctaagggggtgaggcttgccccaggccggtggcacacccaggactgggcctggatgactttaatggtaggacagaaggaagagaaaggagctccccagagtccagctgctgggctgtgcagcccatttgcagtgtacttccaggagccttgatggtgaatgctgtaaaagggggaatctttcttccccacctttctttaaatcatagagctattgtgatggcttctgagctgcaatagaatcacccatgaggatttttgtttgttgtcttggcatgaagttcctgtcccttcacagtaatccggcaggtgcctcccagggcatggagtcattgtgtcacattcttctccaggactgcaggagggtgggcacagagttccacaacttgaaatgcagcagacagttgaaaggattctgctcacaccaggagttggattgtatttttccaaatgcattaagtattttaagcagcttgagctgcttaatgggcctgaaagcatttgattagtccaaagggctctatgcccggcaggtcaggggacaagaagttcttaaaatcctatgggtctgaccccttctgctctctctggctatctggctacaacgggtccccagggttgcagcaatagctgtgacctgcttatcttcccagaagtgctggaggcaagctgatccctgagcactgtgcctggagcactgcaggtgccctgcagccatctccatccacaccccctgcctggcctgccccgattccaggctgggcctcgggctcccctcccttcttcgtccccctcctcatctatctgtggctctttctctcgggccctaccaccaagccctctccttgccattctcttctgtccctcaagccgtattcctcagcatcacatggtcctcccgggtcccggtccactcctgtcatgtgagaacaaatggtgtctgctggaatttgcttcgggcctctgttgtgttttgagccaatgtgtgtggtcctcctaacgtcatttgattcatccggcaaaaggctctgctgcctgcctgtctggggcagagcttctaagaccctgtcagttttggacaatgaggcttccctgggggtgcagagtggtgaagctgtttggaatccttctcttgaggtggagtccagagtttcttcctgtcagttcctccccatttgtgtcagcagggtgctatgtccagcgcaggtcctcccctggcccctttctggccttgcagagtgcccccggccccgtgtgagcagatggccttctgggcggagcgtgcagtctcttggcagggcagccaagttgggggtgagatggacctagggctctctgaccccgtaggtttggcctaggctgagactctgagcaggtcacttacctctgggtcctcatgctcaggttcaaaatgagacagacagtggagttaagagatgatttttctgatccttctttgggtctttgcatcagttattttaaaaaaagagaaaagcaagccaacacaaccatcctcggctgattggtggagcagggcttacttatgtggctagttaaaagaaaatttatttttgaaagctgcatggagattttccgtaagcacagtaatgtgagccggggtcaaagctgtctttcagagacagggaagtgcagagatgttcaatgtaaattgtgccttttagctaaacacttggtagattcagcactggccgtgtaggtttgtcctgcttgttttgggggaaccagaaaagatctgattgaatttaatctgatttctgctagagtttggtcatgtaagatttgaaaaagtgaaccttcctgagccagagcaatcaggcaacaaagaaataaaaggcatccaaataagaaaagaagccaaactgtctgtcttcactgatgttatgattctatacatagaaaaccctaaagactttgccaaaaggctcctgtaactgataaacaacttcaataaagtttcaagatacaacatcaatgtagaaaagtcagtagcatttctctacaccaataatgttcaagctgagagccaaatcaggaacacaatcccatttacaatcgccacacacaaaaatacttaggactacagcgaaccaaggaggtgaaagaaatcagagatgacacaaacaaatggaaaaacattctatcctcatggattgaaagaatcaatattgttaaaatgaccatactgcccaaagcaattgacagattcagtgctcttcctatcaaactgccaaggccatttttcacagagctagaaaaaactattccaaaattaatatggaaccaaaacagagccagatagccaaagcaatctgagcaaaaagaaaagccagaggcaccaattaccaaacttcaaactatactacgaggctgcagtaaccaaaacagcatgggactgatacagaagcagacacacagagcagtggaaccgagtagagaacccagaaataaagccacacacctacaaccatctgccctttgacaaagctgccaaaaataagccatggggagaggactccctattcagtaaatggtgctgggatagctggctagccttatgcagaagaatgaaactggatccctaccttttaccatgtaaaaaatcaactcagttggattaaagattcaacctatgagaatcctagaagaaaacctagagaaacatcattctggatattggccttgggaaagaatttatgactaagtcctcaaaagcaattgcaacaaaaacaaaaatcaacaagtggaacctaattaactaaagagcttctgcacagcaaaagagtaaacagacaacctacagaatgggagaaaatacaaactatgcatccaacaaaagtctaatatcacaactctacaaggagcttaaacaattgaacaagcaagaaccaaataacctcgttaaaaattgggcaaaggacatgaacagacacttctcaaaagaaaacaggtaagaagccaacaagcatatgaaaaaatgctcaacatcactaatcatcagaagaatgcaaatcagtaccacagtgagataccatctcacatcagtcagaatggctatttttcaaaagcaaaaaaaataacagttgctggcaaggctctgaggaaaagggaactcttacacactattggtaggaatgtaaattattcagccaccttggaaagcagtttggagatttctcaaaggacttaaaacagaactacatttgacccagcaatcccattcctcagtatatttccaaaagaaaataaatcactctaccaaaaagacacatgcacttgtatgttcatcactgtggtattcacaagggcaaagacacataatcagtctaggtgcccatcagcagtggactagataaagaaattatggtacatatacaccatggaatactatggagccataaaaaagaacaaagtcatgtcctttacagcaacatagatgcagctggaggccattatcctaagcaaattaacacagaaacagaaaaccgaataccacatgttctcacttataagtgggagtcaaacattaggtactcataaagatggcaacagtagacaccaaggactactagagggcagagggtgacagcggggcaagggttgaaaactaactgttgggtactgtgcttgttacctggatgacgggattaatcataccccaaagcttagcatcacacaatatacccaggtaacaaacctgcacgtggactccctgaatgtaaaataaaggttgaaattagtcaaaaaataaggaaaagtgggccttccccgccccccacacttataaagagttaaggattttgtgtttattttaagccatgttgaactcagcccaacatattgacacaaggcaggacttagtgcagtgtcactaggctttaattttgttgccctttgggctaataaagtcaggttatctcactgggctgtttccttatccattaagacatttgatgtaactaagtacccatcctatggtgacataaactttttcttatgtcattggaaagtccagaatacctggttgcaggcaaggtttgatctagcagcttgaccttgttagcacaggtccagtttctttccctcagtcctccctggtattttatcagcttcatcctaaggctggttcagggaagatattctgatgatatatatttctgctttggcaatggaggatttatattcgattgtcagaagtcctcatgtcctatttaaagtctagtcattggaaaataggttgataaggatggacctgaagaaaataaagcagcaatttgtcatgacaaagcaagactaggaagaggcattggaccagcatgaccaattcaaggacacgttgatgatgtcttcagcgcaagtgttcttcccaagcttgggggacctggcagggctgcctacagggctggtgtccagcctgctctatagaaggcgaattagagatcgcaataacgggccagcttccatgatgaccccaggttgtagtgatgtctatgtagaaatgaaataaatgcataattaaaaccaaaggtaggcttgcatttgggttgaggtcctggcacctacggaggccacaagtgtgtcagggtggaaggtaacttggtgaaataggaagtcactgcctattgcccactcatgtccccactgatggagttagctgggggatcccctggtgcagaccctggagaggcatcactgtcttccttgttcagtgggcttgggtcacctgcatgaattctgaggttgggaaggtgtaaacatttccctcaacacctgcagcccagccgccgtctccctgggtgcttcagtcagccgtcacgttggggaggcgtcatgtaaggtggtccttgtctgagtagaacctgattttgaaaatgaaattcatttccttgccttcattttccagacgaaaagatatgtatttgtggtgtgtgtgtggcgggagagtaattggctttggttttgacaaggaggacaccagagtcctgttctgatactcagttttgggcccatgcgtgacaattctgtgtttcttttcagcatttgccaatacattattttctagagtctctcccagcatacggaaaaaccccaaattcaaatttgacttttctcttcgaggctggttgtggcatgctgaagctcccaaggcatgtaatgtagtgaacaaggtggcctccaggagcgctgtcggctcatgggccccacccacccacctcgcggtgtaggaggatccaccaagtcactgtcagagtgggttggagagacctggcctggggtcagctctgtgggcagatgggccctttcccccactgggtggagtacgctccttagtagcccaagacagaacattgccttctcccgagaaacccacctctggggaaggttaggccatgggatctgcgggaagggttttaggagtagattaatgggatttgtgatcccaagcacccaggccactctgtggtccccacccctgggcttgagtcctgctgaggtataagtggtgctagaagacctctgccctgccctgccctgccctgccccaggaacctggctttctctgggctaatgagtgtcctctctgaaggtatccagaggccgtgcagacactcacactttggtgtgaggcgtgccctcggttgatcagttacactgctgtggggtgcacaggtggcaaggtgggggattctgggatcggggaggctagtctgggtgtagggtcctgccctggaggggctcacagtggggttgaaagcaagctctcgaggcgttattattcgggactctgagtgccgggccatgctgggggagtgagggcagggggagctgcggaggcagggctctgagggctttagaacaagagccggtgtgtgtttcccactgagtacctgccggcacctcatttatgccacgtagcaaccccatgacataggcttataggggactataattatccccatttcacagctgggagaacctaggcttagtgtcacagaacctaggcttagccactgggtggctgatactgccacccagttctgagccagtatcagcttccagccccctgactcagtctctctgctgtggtttcctctcaagtgccaggatccttcctggtcccgtttccaactcagaccagtggaggggcgcgctgtggttaccactcattagaagagaggcagggtctctctgtctctctctgggtgtcccccactgccatctctgggtgctgggggagctgctgtatatctctctctgtctatccctatctctccctccactgccatctctgggggttgggagagctgctctgtctctctatctctctccccccccaccccactgccatctctggagtttgggggagctgctcgctctctctcccccctcccactgccatctctggaggttgggggagctgctctatctctctctctctctctctctctccccccactgccatctctgggggttggggggagctgctctctctctctctctctctctctccctctctccccctccgccaaccactgccgtctctggaggttgggggagctgcctgggatgcagagcggcttggattggtgctccctctgcctcagtggttgagctgacctctgtccagtctgtacacattggatcctgaggctgagcttgggtggctgtggcaggaaggtttggtgacatcacacccttcaggcttgtgtctgtctgagccaggctctgactggctgggagaagaggaggaggtggggttctgggaggccctgaggctgagcacggctgctgtgctctgtggctgcactgcaggggcacgggctcagcatgttctgggccagggcacacaatgctttcagatcaggctccagcaccccacacgccccttcatgctttgcactttttgtctaccagccagagggcagtgaataatgagaacaaacaacatcgggtccagattttcgtggtcattttcctaacaagccgaggtcagagagcactgaaaggaggcctaagtgcttctgccacctcagctgactgtttttcaaaaaggaaagcatgcgtgggatgtgtgtattaggtgttacggtgatgtctgttgtcagatcatggccagaaaaggggttgtttcaattaaaatggattttggacttcgtttttcttggaatgagtaaattgagggaaatagcacatgttgagattttggatttctgctcttagaaaggatttaaaataagtggtcttcagtagttccacagcggatcttcgagactggtacagatggggtctcctggatgtaacgagttcttgctgctttaactggatccggttgactctgtctgaccagctcagctggttcgttctatgaaacgcacttctgctttctggaatctgaaggaaggagagagatagaagacaaagaaggacagatgtgttggtggccagaccctggcttctgaacagtccttcctgatggcttcaggacctgggaggagcggcggagcaggtggctgccctgggcttgccagacacctccattccagcaagatcctcctgggggatgtggtgccctccctgcctctcaggcacaagcatatgcttgtttggcctaaaaaagtctccttaattaaaattaatatcgtaatgcagtaaatccttctgcctcctcttcccctgcccagttacaattcccggcggctctccagcccatagaggaggcttctcaaagtttcctgcctcctggaggagagaagccattccccgatcacccaaaaggacaaagtatgtgcccactctgcgtccttgcttgtcactgcccaacatctgcaaacattaactaaagtgctgagcccattcaggtgtaggactcactagttggttaatgtgacagacagcgtttcctgtgccagcgctggctggtcacttcctgtcatccagcactcttgagtgttgcagtggatgcctgtttcgtaggaacactcagcctgttccgtaagaaggagcgccacttctcagcctgtacttagcaggtcactactgttggccactctgcttttctttttaaaattttaattattaaaaaaattttttttgagagtttccctctgttgtccaagctgaagtgcagtggtatgatcttggctcactgtcacctctgcctccctagtagctgggattacaggtgtgtgccaccacgcctggctaatttttgtatttttagtagagacggggtttcaccatgttggccaggctggtcttgaactcctgacctcaggtgatctgcctgccttggcctcccagagtgttcggattacaggcatgagctactgctcctggtccccttcttatttttatgttagtctttggaaacaattggcatatattttagtctgtttaggttactgtaacaaaataccataaactaggtggtttacaaacaacagacatttatttctcacagttctggatgtgggaagtctaagatcaaggcgccaacagatttgctgtctggtgagggcttcctggttcatagaaggccatcttctcactacatcctcacttggtggaaggctcaggagagttctctggagtctcttttacaaaggcacaaatcccattaatcacctcccaaaggcccactgtctaatagcatcactttgggcattaggttttaacatgtgaatttggagaagggcaggcacaaacattcagtctgtagcagcatacaaaaatgtaacaagaataatgtgatgaacagctaggtatccacaagctgctaaaggtagagaatactaccatattggttacctatttctgtgtaacatattatgccaacacttagtggtataaaacagtaaacatttattatctcacacatagtctgtgggccaggaatatggaagcagctgagctgggtggttctagtggaggggaaagatgtgagctggggcacctgaaggcttgactggggcaggaggatccacgtccaagatcgacttcacctggctgttggctggcaagagggctcagttctttgccatatagacctttccacagagctgcttgagtgtcctcacaacatggcaggcggattcccccagcctcagtgattcaagagagagtatagagagagtagagaggaagccgctgtgccttttatgacctggtctcattagtcatacactgtcatttctgcttatgtctgttcactagaagcaagtcactaaattcaggccacactcaaagagaaaggaattaggttccactctttgaagggagtgtcaaagaatatgtggagagagatatatatatatatatatatatattcttttttttttttttttgagatggagtctcaccactctgtcacccaggctggagtgcagtgatgtgatctcagctcaccgcaacctccgcctgccaggttcaagtgattcttctgcctcagcctcccaagtagctggaatttacaggcacacaccaccacacctggctaatttgggtatttttaataaggcagggtttcactatgttggccaggctggtctcgaattcctgacctcaagtggtctgcccgcctcagcctcccaaagtgctgggattacaggcatgagccaccatgcccagcctgtggatgtattttaaagcatcataacaccattgcagctagagcccctccccagttgcatcttgtctttcacacagaggtaactactgttgaagtttgatccttgtttatggcctagtacatgtataagtatttctatccctgttagttctgcattttgtctgtaagcgttatgtaaatgatatcaccttgtatttttttctgtagtgtgcctttttttttttttgagatggagtcttgctctgttgcccaggctggagtgcagtggcgtgatctcggctcacggcaagctccacctcctgggttcaagcgattctcctacctcagcttcccgagtagctgggattacaggcgcccgccactgcacacagctaatttttgtatttttggtagagacgaggtttcgccatgttggccaggctggtctcgaactcctggcctcaagtgatccgcctaccttggcctcccaaaatgctaggattgcaggcctgagccaccgcgcccatccagtgtgccttttttgcttaacattatgtttgtgagattcatccatgtgaaaacaggtggctgtatttcatgcattttcactgctgtgtggtattgcattgtacaaacataagactatttgtcgttctccattgatggatgcttagttgggttcctgtgacttgctgctacaaacaaggttgtcttgagtactcaggtatgtgtctctctgtgaacgtgagctggatttgtcagtatatttagcaaggattggaattgctatgggagagagtacagtaatcttcaaacgtactagaaacagctaaattttattccaaagtgtgtgggtgtcctcatgagtggtcccactgacagcgtatgagtttcctcttctcctttttcttgacagcacttggtgttgtcagacattttacatttttgtctaatgcgtgaaagtgctgtctacatgaggtattaatttgcatttccctgcgtgccagtgaggctaacatctttccatgtatctattttcacatatatattttttcatatatttggtattctgtgaatgactggccatatcttttgcacctttttttctgttttcttattgatcaatctgatccgttgttgagtttatgtaccataaatatcttttttcttttcttccttctaacataatgtagaagctaagagtgtggattctggggccacattgccagggttaaatcccagcttcaacacttcctgtgtggccttaggcttagtctgtgtatgcctcagtgtcctcatctgcaaaatgggatgatggctccccacggtgggcctgggaggatgcgcaggttcgtatctgtgaatcagttagtgcctgtcatagtaagcacaagatagactaatgcaacctagtgtgctgggccctgtgtggccacacggggctgtatgcacaggcgtcaccatggccagagctggagctcagatgtgtctgagaagattggcagatgctgcttcactctggctcccggtctcctgggtggccctgcttccatccctgagctgcctgaacggaaaacgaaatcccatccccgctccagggggtgcctgggaattggaaggcatcaggctcctcacagcaaaaatagaagcctcatttgcttaggagagaacaatgacgaggaggcaagccagcagaggcggccttggcgggctgtgtacaccctctgcttgtctccgcactccctggggtcagacgtagacgtggctaagctgcctgcagaccttctcttccccttcatcctggcctgcagtgggcatcagggtccatcctgggacgtgggctgtcttggcaccaagttccagttcttaatacctcagtgtcacactgttccctgatttctcaaagccaggaaggaattgcagaaaacaaggtcagtttagtatcgagaatcactggagagccgtgtcagagccctgctgagaagggcgcggggaactgtgttcctgtctacctgatgctgtgggctgcacaaggacggacttactgaagattacaggccagggggaagagggcacgtttagtgtcaaccctacacagaagaagttagctccgctgggcgcggtgggcactttgggaggctgaggcgggtggatcacctgaggtcaggagttcaagaccagcctggccaacgtggcgaaactgcgtctttactaaaaatacaaaaattaacctgttgtggtggcatatgcctgtaatcccagctactcgggaggctgaggcgggagaattgcttgaacccggggtgggagaggttgcagtgagctgcactccagcctgggcaacggaaactccgtcttaaaaaaaaaaaaaaaaaagaacaagtcagctcagccccactgcaaggagctcctgggtttatttaagtgagcctcagataactttacataaaagcaaatgtgtaaaaagcgataaagtcagatatattgaacatttgtcctgagggcaaatttctgagctctaaaagccagtttggttttagataacatctgtgagtctggaaacaggctgagatactctatatctgcactcccaactctgcctttggctttgtgagccctgtggtctccttgaaagaattggtccccagtgggtgaactaatcacccatgaagagtctcccaattcaaatctggaataaaaagtgaggacatgggggcagaatgttactcatcacatgtggcccgtcagtactagacttcaaggtaagtttccaagaacagagctctgtgaccattttcatgatagcaatttgtacattattactaagtaattttaatgccgtgtttacaggccaccttcccaaacaaaacaattgtttctggaagttagactcttgaagacttaacttttaatccagtttgttctcaaaacatttgcacaaatgagagtcttgaggtttgagctttctattctaaaggctcagcttcttgcccaggagaaaaataatacatgctcgtgtttataaataagagttatggcattggagtcctttacattgcagccagcctagggactcagttattcagaatttaaacattttacttgtaaagagcactttggtatccaccccaagggccctcctctgcctgtctcagcaccatctctgtgtgtcccatcaggaagcaacagacaactccctaagccccacagtaaaaacgtctctcctggtctgggggcgcatccatcccccatgtccccagtcccatcctgggtgttctgggattccagccacagctgtggggacaccgccatctcactgcatccctcttgctcttgcggcagcttggctgagctacagggccgggccgcaggaggcgtccttgtgccggagctcaccttgtgccggagctcaccttgtgccaggtgttgagctctgccagctgcccggccccactgtgaggccgccccttgcaggtgagttcactggcagcccagccagcccacgaaggccatgtgagtgtgaacccccattacaagctttccctcatgagatggcgctgatcagtctgggggatacctgcctttcagtatgggctgcagccattaggctggtaccaggaggagccaggtcgagctggcactggggcgacgctctgtctttgatgcaccctgatgcctcccccatcctgctgaccatggtgctcagcacagaccccttccaacccatcccagggcctctgctcagtgtggccagagcctcctgtcaacaagtatgtcactgccttcgggttattattgttcaccagattccacttgctctacaacccaggcacagtgcaccagagtttcccaaacctgtgtgccgagtgccagccccttagcaagtgcagcgttgcccatttcactctgggaaatgcagccatagctctggggccagctagaggaaggagtgtgattgtgccttcccgggacagcttccaggtctgggagtctgtgatgttgtgagtgttgccttagctttgctaagaaaatgcttagggagatgggttccttcacccattcttccactcatgtgcctttctggctccagggctggtgtcccctgctttggaggggacgctcacatgagctgccctattggggttccgtcaagtttctcttagcctaagcggcttcctgtctcgggctccctccccagccatttgggtcaccttgggtccctgaggatcgcttctggatcttggaccccctcaccaactcctgtgacataataatcaaaggtaatcaggaaatgtatgaatcgtcttctttaaggaatatttagcatttctgctcattccagagtccctggaagcatggcatttcaaaggcttggttagatcacaagtccaatttactgccagaaatttgcacgtagaataatacagagcctatgatggcagttgaagtggtatcctgtgagaaaattaattagtcctgaaactaaatgccgacagcctcagcaaaatattcatgagagaagcaaacctcgtgcgtggtgtttgaagtcaggcagctgaggctgtgtactggacgtgttctctgtggctgagttctgctgtggattctgggctagtctaggcaaggcctgcctctccttctggactggctcccagggctgggggctcaggaaggccctgcaccctggagaagaagggagcccctgagactctttggccttgtatttgtgtgtccctctgggctgcagggctgcagaataaaccagctcccaatcctccaaacaaaaataaagacctgtgaatggctacacttggagagcagagtgttttgatatcatggggagacctgtgtacttaatttacggcctgaagattgagaaggatttaattgttccaaaaatggtgagaaaagagcaggtcccagcctttctgtctgatcacaaacagccgagggggactggggaagtggcctggtcctcactgcccctggaggggcaggaagaggatggagtgatgtgcttggcagatgcaggaatggccaggcagtgggaaaagcctagggtttccaagccatgtctgatcctctgtgttccttctgcctgctgggatggagcccgccccccaaatatgcctggctcacttacgactcagagtcagctgcccccagggacttcccggctctcgtgaccttgctgggcatgactttcaggggagccctctgtccaggagacataggtcactcgaatcacacagccgtgctttagtgaatgctagccaggggccctggagagggcaaggacaggacactcctgcatggaaacgaaaatgaatatttttctctgcagaaaatgaaaagtggtgctgggtccaagtggtaggtgacctggcttttgagcgaaaatgctgctgggaaatgagagaaaagaaacatgaaaagaatgcaaatgagggtggtggacaggggcccagaggcctgattcctccaccctccgcaaaggctgggtgtgtgatgcctataaatagacactcaaaacccgttctaaatggagtgaagacatgggcctgcttcctcttatggaaaggccttacataaggtgcagtgctgctattgctcctgggcggtgtgatgattctgtgcctttgtcggaagtcagtgtgaagcctgtggggcttctgggggatgcacatggatgagctctgggctttctggagactcgcagactctgggaaggaggcggtgggcgatgggcaggtctcctagggctgggaaacagtcctgagacaggctccgggtttcctgaggcgcttctgggccaggagcaagtgggaaaagctggactgcagggcttggtcaagtgacagctgcccagagccggagtttagggtgcctggagaggacaggggctggcaggcctgactttctcactgatccacttggggtcacagagccaacctgtaacagagtgaggaactgaggccgcattgctggactcccagtggaggattcttgctgctggactaacctttagttcatgaactcacccagaaattacttatttttggaggaccgcagatggcgagcttaggagtgaagaagggaatactatttgatgctaatgtgattccaggcaacattctagaggttcccttgcaattcaccttcccagccacctttgaagtagttattggccagttttatacacgatgaaactgacagagatggtgtgaagggattttctgacgttcacacaggaagcaagcagcccatgctgactccactgcggaaagcgtgtgtgtgattgacatgctttttgtgtggtgctcactttgggtgtgataaagaggcctccttgcaaagggccaggatctgtgaagcaccatgttgcttcacagaacaggccgtgaaaagccacagaagcaccatagcctgggaaagaaatggaacaacggtgcaaacagccagtttcccctgagcagaggcaagcaggttacggctctgcagctcccttaacgggtagcttgttcaacatggaaacatctttagcctcctcagagacgttgggtcatctcctttacatggggaccagaagtatcttccctgggccattttgggtggaggaaatttcgtaattataaccctctgctaggggtgtctacctaggaagtgagagcaactggccgctttcttagagaagtgaagacgctgagtagactaaacctttgtgatgaagtcgaagccactgtgttgcctgtgtcctgtttccttccccagtgaatggggctcttccctacgactgcagaccccaggaccagattgcaggtgccctgtccagcagcgcagccattcgtgaagggctcgcagcctggcccggctcaacagctgatgcccccgggaggaggctgtattactatcctttttgaaaggaacacagaaagccctttgtaactttgtctgtagccaacatggagggagaggcagaattcagatgtgatgttgcagacaattgaacacccctcctcctgttccaccccagcttcctgcccgtagccttctaatgcccttgccctgaattcctgatccaacccaagggcctggccttgaaacccccgagcctgctggcagtagcttcctcttcagccttcctgtgcagagcttcctctattcagggaagtctgagacctggtggcctctttctcattcttttcatgaaaccatcttgcccaggagaaggtgggctgagaccctgggcattggaaaggagaggtggtcctccttcctctcttcactttcatcgcagtcctctccccgcccacccccatatgcacaccctccgcagtctgaaagtgtcgtgaagcaccagctctgcaaacccgtggggtcaagctttgttgtgggaaaatacatattcatgagggctttgaggagcctcattaaaatgcagagagtctctcctttcagaatggtacataagccatctctttatttgcccaacacattgttcttaaggcaataattatgcgatgaatggctaaagaaacattttaattatttgtttagggtaatttctgattatctcattagaattataatctgtccacttttacaggtgattcaaagcctcatatttacatttttatacttgaaggagctctatgtgcgcacctgtatcattgctgaagtgaaagtaattttctctgttttcttctgctttattccagaaagatttgatcaccaggagatttttcgggacattaccaaaccactcattttaggtaagaaatacaaggcagcgttgcatggaatgaggttttgcttttgccatgtggggagcggaccgtttcactggagggaaaatgctacattgcaggcagagctggcaactgccgtggctctttgttttctgggatcctgtgtgtgtgagcttggggagtttgaagctggggtttgagtcacagccaaggagtggatggacactggggacgcttctggcacttaccttgcccggaaccgacctgcccaccacccaatgacaacacagcaagacacgcactccccatctgtcctctcctcattatactggtgtttctgtaaaccatggtcctcaccagactcagtcattgatttgtgtaacccctacctaggttcctagttacagcgaaagtagacacatgtatatcggcaataataggtagcactcgaacctttcactctccagtgtgggcagtggctggtctactttgagaagggaccagccattgtgagataccaggaagctgagcagaagaaatctaactttgataaaaagaggcctcctcatcttgccagggatggagcgtggtccatcctccctccctgtgcatggagcagtattgcagccctgaagacactgccccatggtcagcatctggcttgcccttgccctgtaggactggtaggaacagagccctggtgccagccgagtgttccacacaggggagacttgcaagggacaggttctgcactgcagatgaattggctgtcttcttctgtggctggagacacacaaggcagcggctttgtagggaaactggtgtacagggtggggcgtgtttggagaacgaggagcagagggcattgttgctggagttaaagaagcagagccagggatggtcttcatgtcctgatgcccagagcaggcctgagcttctgatggattctgggggttcttatgtattcttgggaaggagcatgtggtaagcttggacagggaggcagttcagagtgttacatgcaaggcagcggtggccttgggaacaccccccctgcctgaccaaggcaaggaacactttgtgtgtcccagtgtggaatctctgtgccagttgtgaggggacggatgaagaccagcaggggtgaggacgggattctggagtgtcaagactcaggttcagaatcacagtttttcttccagggcagcacaaggccacaagtgtggctatttgaagccacccaaaaagccattatttgtaaagcaaggcagctttattgatttcactttctgccctgcatctttcccacattgtggtaaccactcaccatccctgttctgctgatgaggcaggaattcccttgcatccagttggggagcattcttgtcacaaatgtcctggatgaattacacggtggctctccgtggagggagcacattcacaaggcatttaagagatgcaggacaatcagccctcgtccatgaaacagggtgaaacgtagaagagctgcgtgattattaatgggtttggacataagctggagtgtttactgaaatttttctcagttgtcagttttcaaagtttgtgaatgtacttttgtgctctcaacaggccttttctgctctatttaactttctacttagggttgtaaacatacttcagccgtaatgacattagatacatcatccactctcagctctgaaaatgctggagattttgattatcaccagcagtaaggacagcttatgaagggagatgttacttatggagacacagctcatgattccataaaattccagtcttctgggagcccagggttaagcagctgcctcagcccatccaccctctagggactgtccacggtgaaattggcttcttgacgttttccttatggaacctggggtgtcattacattctgttagagtcatagggtggttctatttatgcctgtaaggtataaggtatttttttcttctgagtctagaaaagacctactggaatttttatgtatcctgaaatactattagacgatcaaaatcaattgcaatagagaaggtgctgggctctcttcccaattgctctcacccatctgcagtgtaataggcctatcatgtaagtgaatatactcatcacaattctctgcagcttcccagcagaaaagcatattccttctcagagagaaaggcggcaaggagatggatatttttaaatgccaattatgccagaatgagtctctgtgaggagatctgtaaagagaagaaagggccggggtttatttatttttctgctgcgaatggaatcattctgtagcttcagaatactaatccctgtgatgtgcctgatgtcttttcataggataatttgtgaatgtgcttccacttacaggaaaagtttgaggctcttttcttattcttctttttcttttttttttttttttgagaattaaattctaggcctcactatatcctatgataaccgtcctataggccctcgatctataaaatgtgtgcataatgaaatatataaaatcagcgattatcctgaaggaacacagaaaagattaataagctgtatttaaatcacggcaagtctcagaacatatattaagttagaagacatcacgtcctgaaaatgacgggctgatgtgatactagcatgtacccccgtatggatgcatataaatgctgtgtaaaacctagcccaaagtgttctttaaaacctaagatccaaagaaaggcatggaaattccaagctatgagacatgaagagaaaacacaaagccagagcactaagggaggaggccatgagacccccaagcagtgaggttcctgatggagagccaggatgatgaagactgtgtgacatttgtgcagggagagacacggcaatggctgggacagggtagcaaggctaggagcaagtgctcatatgtataggaagccaggaggtggcagacgtgtgttatggaccaggtgggatgtgatgcaggacagctggttggccacataggaaaagagaaaagataaagtgagatccctacctcacagcacatgtaccagtaaacggccatagaattaaaggcctatgccgggcacggtggttcacacctgtaatcccagcattttgggaggccgaggtgggcagatcacctgaggtcgggagttcgagacgagcctggccaacatggcaaaaccccatctctactaaaaatataaaaaattagctgggtgtggtggcggacatctataatcccagctactcgggaggctgaggcaggagaattgcttgaacctggggggcggaggttgcagtgagcgagatcatgccactgcactccagcctgggtgacagaatgagactccatctcaaaaaaaaagaaaaaaaaaaaggccaaaatgtaaagacaaaaatgttaaaatacatagaagattttttctatctgctcttgaggtgggaaacatacacacatcataaaagaaaagatggattaatcaaacatcagtattagcaacttctttaagagaactacaggctggaataaatattcatgatgaatttactgtgagagatttgtattctgtttgtatcaagaactctttcaaattaattttaaaaagacaatagaattgaaaaatgagcaaatactatgaagaagaaaaaatgaaaatgtcaaatagacaaatgaactctgccttgctcctaatctgggaactgcctgggagaccatgagatgttggcaaattagaaagtctgataatcgaagggttgcccagagtgtgaagcaagggggccttcatgtcctgtttatcaagggcaagttagtaaacccctttagagaacaattaggtgttatctagtaaggttgaaatgtggatcccccatgacccagcaattctgctcatgaaagggattcagtgttgtattagtcagttctctcaaaaacagaaccaataggatcagtttatcttagagtttatgtatcgatcaatcgattgattggtcaattgatataaggtattggcttgcatgatatggcatctgggaagtctcacaatctgccatctgcaagctggagacccagggaagccagtattgtagtgcaaaggcctggaaagcagagaactggtgcagattccagtccaggccgaaaggcctgagaaccagcagcatggagggcagagaagaccaatgtcccagtcaagcagtcaggcagagagtgaattcaaccctcctctgctgttttgttctatgcaggtcctcactggagtggacgatgcccacctacactgaggagggccgtctgctttactcagtctgccaattccaatggtaaccgcttccagaaacacctcacagactatccagaaacagtgtttaaccagacgcatgggcaccttgtggcccagtcaggttgatacataaaattaaccatcacaagtgggtcacaaccagcgttttctaaaaatatgaaccagattagaacagaagatatcagagtttgttctgcatagtgaatgatagtgatcctgagaagggggactttgaggggatgggactgacagcgatggttaagcctgaatggaggtttgctacattgttttctatacttctatgtatttgcaaagttgaggagaaaagaagttgtggtaaacccctggatgtaggcacacggaccccagtgttctgtgctgtgggtccctctgatgcagccgtcttgctcccgtcttgctggttcatcctccaccttggctgactacctggcctcacccttgtacaggtgcttctgtttgtctcttcattgaaatgggtgggatttattgatttatttagagacagggtcttgctctattgcccaggctggagtgcagtggtctgatcatggcgcactgcaaccctgacctccagggctcaatcaaccctccctccttggcctcctgagtagcagggactacaggcatgtgccaccacacccagcttatttttatgtattgtttttatagaggtgggattttgccatgttgaccaggctggtcttgaactccttggcccctagaatgctaggattacaagtgtaagccatcattccctgtgtgaaatgagtaggatttctgaatgagccaggctttgcacattgacctggctctgcctcttgaactgctgccttcacatgggaggctccttctggccctgcctgtgtggctgattcctctctcaggtgcttctctttatcttcacagacgaggctcatgggcttcactttttgggaccttaggtggacatctgagtccacagccctcctgcctggcttctgtctctgtggatttgcaggcctgcttgtcccatatcctccagtgcccagcccagtgcctcatgtacagtggatgctcaagaagtgtgtagtcatcacatagctctagtttcttatttttatttttatttatttattttttttgagacagggtctcactctgtcacccaggctggagtgcagtggcatgatcataactcactgcagccttgaactgggctcaagcaatcttcccacctcagccccctgagtagctaggactacaggtgagtgccaccatgcccagctaattttaaaatcttttgtagagagggcatttcaccatattgttcagactggtctcgaactcctggcctcaagtggtcctcccacgtgggcctcccgcagtgctgggattacaggcatgagccactgcctctagactttagaaatgttcagaagctcaccttcccatctgcaaagtggagactcatgagttgggggcgggtagattgtgagaatgaaccacataatgaagaggggatgtgtagcacatgtgagttttcccatcttgctggtttccttccctggaagaggcaaagagaggacaaggagctggctgttactatttgcttgcagacttggtgtgtgctttcaaattggaagctcctgctctgacacccagttcttttttgttttaagttgtactttagaagagaaaaaaattcatcaacacccttttttttaaaagatggaaaatgggttaagaaagtagcacgaggaactgtgagcccaacataattagtgtgatgaaagagaagttagccatttctgtatgtaacttttgattaatgatattcagctctaattaattatgtccaattctaattaatgacattagtgtgcaagctggcattctcaaactatattctgaggattcccagcggatgttcttgaatataatagtccccggtcacattaggttgggaagtgctgtgtgtactgcccgtcttggacactcccaaagcaccatataaaaggccttcagaagtcctgcaagaaaaggaacaatttaaatttcttttaacctgtcatttcccagacttacttttaccatgtgtgctgctaggcacatacggacatgctaatttaactctcataccacaaggtgtgcttggatgaattgatgagcaatgtacatgtcatggagacgttttctaagtcttccagagtcatagcaggggtctcctgtatcgcagcagagcatactgcaaagaattgcatttccatacagtctagggctgctgtgaactaatctcctttcttgggcaaatcgcttaatctccttcaatcagttcatacatctgcagaggaaagggtgatggcatgccaccctggatggtgggaggactcctagcagtggtggctgttaccatctcataagaaaccctcattacaagaaagtccacgtcatttgccatgtgctggtctcggggggtcagcgagtggggggctgcagggagagaccaccagttacctcctgagcctcacgtgtggggtacactgtgttttgtccgttgttggatttgtattcattgttcatctaaaagtgattatgttgaaaaacagaatggtggcagacaggcatgtttggcatgggttaatgcgaggctggaaagagagcccctgaccttcagttcgagaatcagccactgcaggaaagggtggcgtcttggtggccgcatactgtgaatgtcaagggagacgaagagtgcaccctggggagggcggactcatcagtccagtgggttgtccaggagggagtgagggttgatctttcatctcgaaggatgaatatacatttctgcgagagagggggaagacgggcgttccaggcaaacaagcgtgtatatataactgaagcgtggacagaggaagcagcgtggctggtctgggaatggaattgtttgatctggcttgatggaggagctagggggtgaggtagaagaggtggcagaggccagcttgacctgtgtagatggcttgggagaagccctggcaggtctttgttggagggctgacaggaagggatatgtgctttccatagttgaccttggagggtgcggcatggggtggaggcccgtgcaccagaggctcctcatagagtctctacagagagatgaccaggctagcgttttcatggcatgaaggttgtcttcagaaactcgcttcacaatctacttaagatgagtcaaatctaccctccaaagaacatctgctgctactggagatagcgcttcaaaagctaatgcaggtgctgaatgtttttccaccatgagggttccttctgtgcatcaattagtctagactcttgctgtttgaggaaagaggctcagagtagttaagccactagctccaggtctcatagctggctgataggacatcaacctgcggagtctctatggaggtggaatagtttcagtggtgcactgaaacagtaggggatggataggagaaaggcttggtctattagtcaggttgagccagagaagcagtaagggatggatatgaggagatacattgtgaggaatctgcacacgtggttttgggacctggccaggcaagcctgaagcccgcagggcaggccatggggaagggcaggctggaactcccaggcatggctgcagctgcagtccacaggcagaatttcttcttcctgaaggaagccttggctctacttttaaggtctcctgacaaattgatccagacccagacagattgtctgggatgatctcctttctaaaagtcaactcattatggactttaatgacatggacagaagactttcacagcaacgtctggaagagtggctgattgcctagccaagtcagtacctcaaaaagaccacactcttgataacacgtgggggctccaggaccaaaagctggtgctgcagatgtgtggggtggcagcattgtcacttcctgtctcccactaacctcagggtcacagtgggctggtggctgtagcatgctccacacctgctctcagggatgctggagggagactgaggcccaggcttttgtcttagagacttgggatatgtctaggatcccttctaaaagccaagttctagatagaatctggcctttcagggttggagagaccccatgtggcttctgagcagacttccttcctgatctcagtcttggaagtgaaggtcttacccctggttgcccccttcctgtgacagagggctctttgcctctttgcactccatgccccagagacaatcagtgctggggacaattttgtcagaaatctattcccagccctagcttagcctagtggcactctcagtcctgaaagctagaggccatttccacattggtgtagcaccgtggttctcagactgtgtttgctatcaggatcacctggggaacttggtaaaaatacaaatgcaggtcatattctgcttcctccatcctgggcctctgtgttctttattagccttcttggtggttctgacctacatcaaagttgaggaccactggcataacgcacggctgctcgaactccagtgtgcgccggaatctcctggggatctcatttattttatttttattttttgagacggagaatcactcttgttgcccaggctggagtgcagtggcacgatctctgctcaccgtaccctccgcctcctgggttcaagcaattctcctgcctcagcctcccgagtagctgggattataggcacatgccaccacgcctgactaatttttgtatttttagtagagatggcgtttctccatgttggccaggctggtctcaaactcctgatctcaggtgatccacccgccttgggctctcaaagtgctggggttacaggcgtgagccatcacgcccggccagggaccttgtttaaatgcagattctgattccatggtttttggtggatcctgcgattttgtgtttctaacaaccccccaggtggtgcagttgcttctggtcctcaggccacatcttaaatagcaaaggcgtagataggggccgaaattaagcacttaagaattacccagacttgcatcggaattctgcctctaccacttaactgtctctgtgttaccctgagcagactgcttgatctctctaagccttgatttccttatctggacaatgggaataatgtgcctttttttttgtttttttgaggtagcacctctgtctgttgcctagcgtggagtgcagtgctgcaatctcagctcactgcagcctcaacctcctgggctcaagcggtcctcccaccttggtctcccgagtagctgggacctcaggcacacaccaccacacccagctaatttttaaatttttaattagagacagggtctcattgtgttgcccagactggtcttaaactcctgagctcgggcagtcctccctccttggcctccgaaagtgctgggattacaggcgtgagtcactgctcttgctgctttttaaataaaaactgctggccgggtgcagtggctcacgccagcaaattccagtgctttgggaggccaaggcaggtggatcacttgaggtcaggagttcaagaccatcctggccaacatggtgcaaccccatctctactaaaaatacaaaaattgcctgtcgtggtggcagacccctgtaatcccagctactcaggaggctgaggcaggagaatcacttaaacccaggaggcagaggttgcagtgagccgagatcatgccactgcactccaacctgggcaacagagcgagactctgtctcaaaataaataaataaataaataaataaatattgctttgacagttagaaaagaaagagtttaataccgcaacataataaagaccatacaggcaaagccaccagccaacagcatacccagtggtgaaaaattgcaaaggcttttcctcttaagatcagaaacaagacaaggatgccccctttcaccacttctatttaacatagtactagaaattctagccagaacaatttggcaagaaaaagaaatcagaggcatccaaattggaaaggaagaggtgaaattttctctcttttcacatgtcatggtcttatgcaatatgtagaaggccttaaagacttcacacgaaacacacaaagctgttataactaatacatgaattcagtaaagttgcaggatccaaaatcaacacacaaatatcagttgcatttctatacactaacagtgagcaatctggaaggggagttaagaaaaaaattccattaaccaaggaagcaaaaaaattgtacacagaaaactaccgaacattgctgagagaaattaaagaagacaccagtaaatggaaagacatggaatgtttttagattagaagacaatattgttaagatgtcaatactacctatattagtccattctcatgctgctaatacagacatactcgagactgggtaatttacaaaggaaagaggtttaatggactcacagttccacatggctggggaggcctgacaatcatggttgaagatgaaggaagagcaaagtcatgttttacatggcagcaggcaagagagcttgtgcaggggaactctcatttataaaaccatcagatctcatgagatttattcactaccacaagaacagtgtgggggaaccacccccatgatacagttatcgctacctggccccacccttgacgtgaggattattgcagttgagggcaagatttggcgtgggacatagccaaactatgtcatatccaaagcaatctacagattcattgcaatccctatcaaaatcccaatgatgctttttgtagaaataggaaaattcgtcctaaaattcttgtgcaatctcaagggaccctgaatagtaatagcaatcttaaaaagaaggacaaagttggcgatctcacacttcctaatttcaaaactagctacaaagctgtagtcatcaaaacaatgtagtagttgcataaagacagacatacagacgaaaggaattgagtagacagcccccaagtaaaccctgacatatatgggcaaatgattttttgacaaggatttcaaggtcattcagtggggaaaggatagtttcttcaaatggtgttggaaaaactgaaaacaatataaaaacaacacaagagaatacaaaaatcaactcaaaatagatcaaagacctgaacataagagctgagaccataaaactcagaagaaaacaggtgcacaacttcatgacattggatttggtagtgacttcttggatgtgacaccaaaggcacaggcagcaacaggaaaagataggtaagttggacttcatctaatataaaaacttcctcaaaggacacagtcagcagtgaaaaggcaacccaaggaatggacggaaatctttgtaattcatacatctgataaagggttaatagccagaatgtgtgaagaattcttagaatttaacataaaaagaagccacctgattaacaaacgaacaaagggcttgaataaacatttctccacagaagatagacacatggccagtaaacacagaaaaacatgctcagcatcacaaatcgttagagaattgcaagtcgaaatcacaagataccacctcatatctattaggccggctattacaaaacaaaacaaaacagaaaataagtgtctgtgaggatgtggcagaattggaacccttgtgcactttaggtgggaatgtaaatggtgcagcccgtcggaaaacagtatgacagttcctcaaaaaattgaaaatagaattgccgtggaatctaggcgtggtttcacttctgggcatatgcccaagggaagtaaaagcaggggctcaaggaaatatctgtacattcatgttcatgcagcatgattcacaatagtcaaggggtggaagcaacccaggagtccattggcagatgaatggatcaacaaaatgtggtgtatacatagaatggaatattattttgccttgaaaaggaaggaaattctgacacatgctataacatggatgaaccttgaaccttgaggtcattatgctaaatgaaggaagccagatagaatagcacagatcctgtgtggttccactgacatgaggtactcagaatagtcaaattcatggagacagaaagtagaatggtggttgccaggggctagaaggagagggaagggggttagtgtttaattaggacagaggttcagttttacaaagtgaaaagagttctggagatggatggtcatgatggtagcacagcagtgtgaatgtacttagtgtcactaagctgtattcttaaaaaggcttccaatggtaaatttatgttacgtgtattttaccacaatttttttttcttacaacggaaaggactcaacaccatatctagtaaaacacacactgaatgttgttattgaaagcatagatggcaggatcacttgagtccaggagttcgagaccagcctgggcaacactgggagactcccatctctacatagaattaaaataacagattagctaggtgtcctagctactcaggaggctgaagtgggagggtcctttgagcctggaagttcgaggctgcagtgagctgtgatcatatcactgcattccagcctaggtaacagagcgagatcccatctcagaacaacaacaaaaaacaaataaaaaaataaaagcacagagccagtcacagggacactccatacatatgaattctacccacagtcattcgtgcccctgagtgtctgccttcccaccattctctgggagttggtttccattccctcacctctcctgttctctctgacaaaggtaattgaaactatgtttctgttctttcagtatggccaggtgggaagctgttctctagtgtgagttaaccaggacagagggtgtgtatgtgcaggggagagaagccggcaggctcttcctcccagatgctggactatggaatgtgatactaacatggggatcctccccaagagccttggatcccctagtgcaccaaagtatcctactgagaaggcatcagaaaatctgactcacagaagttagggcagtgtttacagtaccatgacagcaggcagagcttggggttcaaagcagaatctgaggaaagactctaaaaagacgagcccctgcccaagatatggtgccttttctagtctcatagcacattgcaccccctcccctcactgtaacaatccacaccctcagaacgcgcacctggagttgttcatggagactaaagtgggaggaagctttggacagtcacctttttgaagtctgttttgaattgaacagtgtgcaaatgataagccacttattttaaaataagcttcttaattcaagtgtaatataaacagaaaagtacaaaaatcctaagtgtttattaccatgaatattttcaaagtgaacacatccatgaaactaccatccagactaggaaacaaaacatcaccacaacccaagaatctcccctagggtcctctcccagccataacccacccccgaccactaccaccaccacctaaaggtaatcagaatcctagcaccaaatgttatttttgcaaatgtttgaatttttttttaaataaatgaatttctacaatatatactgttttatgtcagcttattttatgcaacattatgtttgtgagagtcactcacaggtggtgtgacagtagttcattgactcactgttacagagcattgtaaaaatacaaataattcatccattctatgtttgatggacatttgcatcttttctagttttgggtcatgattgctgctgggaacactgttacacatttgttgtacacatgattgcatttctattgagggtacatccaggattggaatgggtaggtcacagggtctgggtatgtttctattttagtgaacactgccagtcctttttctgacgtgattgtacccaattacactcccacctgcaaataggagtttcatttgctccacatccttgctcataactggtggtgttagtcattttaatttgatttttagtggatgcatggtgggatcctctggtatgattttcagttcactgaagactgttgaatatctctttcgaatacttgtcttgtgcttttcgaaaccttctcttgaagtttttgtgcaagtttttgctcatttttctgttgcattttctttcttagtgctttgtaggagttctttttttgttttatgagatggagtctcgctctgtcgcccaggcttgagtgcagtggtgcgatctcagctcactgtaagcttcgcctcgtgggttcacgcccttctcctgcctcagcctcccaagtaggtaggactacaggcgcccgccaccagcccggctaattttttgtattttttagtagagacggggtttcaccgtgttagccaggatagtctcgatctcctgacctcgtgatccgcccaactcggcctcccaaagtgctgggattacaggtgcgagccaccacacccggccgggagttctttatatagttagtacctgagacctttgctagatgtacatattacaaatattttctcacactttctcacgttcagtggtatcttttgatgagaaggcccagattatcaatcttttcctttaaggttaatgctttttgtgccctgtttaggaaatctatgcatacctaagaacatgaaaacaacagcatatttattttttccagccattcttgttttctaatatatgattttagggttataaatagcctattaagcctgctttagctgtaatccactatttttaaaaattgtagtaaaaaaacacagcataaaatttaccatcttaaccatttttaagtgtacagttcggtagtgttaagtaaattcataatgttgtgaagcagatctctagaactttttcatcttgcgaatctgaacatctatacccattaaacagcaacttctcattctccttgccccagcctctgggagccaccattctactttccgactactctaggtacctcaagtggaatcctacagtttctgtctttttgtgactggcttattttgcttagtacagtgtcctcaaggttcatctgtgctgggttgtgtgataagattttctccctttttaaggctgaataatattatgtggtatgaatagaccacattttgtttatccatcatccatcgatagacattgggttgcttttattccttggccatgatgaatagtgctgctgtgaacatggctggctgtccagcaccatttttggatacgttgtatttttattattaattagttcaaaatctgttcactttttaaaatttctcctttgaaatgtgggttattttaaagtagttgatttccaaatgcctccatattttctggttatatttttgttatttatttctagcttgcttaccccgtagtcaggaacagattatttacaatgttaacattttgaaatttgtttacactggctttagacttgtccaccatatgattaattttgacagactatcccatgtgcccttgtgtgtagttcctcagttcagtactttcgatatattcatgaggaaaaatgggtaattgtggtgttcaaatcttatatttccattcttatttttacttctttgttatatcatttactgaaagaagtgtgttaaattatccagctgctcataatgtctgtgtctaatagacataaatttcataatgtctaatactttagatttgtcttattatagtcctgtcaattctccctttataaattttgagtgcatttaactagatacatataaatttagaatttattcctagtaggttgccctttttaattatgaattctttcttttccataagaatgctgcttttcgtaaaatctagtttgtctaattaccaatataggtatataaactttcttttttaacttactgctttagaatagttttagattcacagagatgttgcgaagatagtagagagttcccatacatcctgtacctacttttccctgttgttaacatctcacattagtatggtacatttgttacaattaatgaaccagtgccaatgcattattattaactgaagtccatacttcattcacattttcttagtttttatcaaatgtccttttgctgttccaggattctattaggagactgctttgagttcagttattatgtcgctttaggttcttttagactgtgacagttcctctgactttccttgtttctgatgaccttgacaattttgaagagtagtggtcaggtattctatagaatatctttaaatttgagtgtgcttggcatttttctcatggttcaataggggctatgggctttggggcagaagatcccatctgaaaaagtgccattcttatcctatcaaatcagggctacataatttatcactgctgatgttaccctcaatcgtctgagtgttatgcaccatctccatgagggaacagtatctacacaaattatttgcaattctgcacagggagattggtctgttctcactcatttattttctcattcatttatttatatttgtatggactcatggatattcattgtatactttgggctataaaccagtattgcattattaattttgttgttcagatagttccagcttttgccctttcctaagatagtggactcacccctctgtgtttcaactctaccaatttggaccctcaagttcttgttgccttattagccataaattgcaatttcttatttccccagtcctctgagactactgaaagttctgcttaggcctattgcctcttaaccactactttcttcctgtgtgtgtttttaaccttttggcttccatcactcacaaatccccaaatgccttgacgagaaaagcagcacagaatgctgagcttatttctgggtaattatctacttgtcatgatctcagcccctcaagtcctagctgccttggactctctgatgcttccacagagatcatttaaaaaaatttcgtcaagagtttctagttgttcttggtgagaggattagtctgacacaagctagtgcatcatagcaggcggtggaattcttcagacataatatttttttttacttcttctactatgtcatagttgatggtgcctcatggtattttaatatctgatgctttgcacccatacagcaactatcctgagtaacgaagatgttatgtcatataggaaaatgagtcattcttttttttttttttttttttttttgagacagagtcttgctctttcgcccaggccggactgcagtggcatgatctcggcttgctgcgagctccgcctcacgggttcacgccattctcctgcctcagcctcccaagtagctgggactacaggcgcccgccaccgcgcctggccaattttttgtattttttaagtagagacggggtttcaccgtgttagccaagatggtcttgatgtcctgacctcgtgatccacccacctcggcctcccaaagtgctgggattacaggcgtgagccaccgcccccggccgaaaatgagtcattctttgcatttcattcatttatgcccttagtcacaagggctttagcaaagaattggcttccaccctctctttaaggtaaggaaataaataatgaccttggaagacagtattcatcataaaagcgcttgatgaaaggagcaattggagtgaactatgtaaaacaggcttttcagtctaatgggacagtgtaattactggtgcagatttctagttaggccttaaagaaattaagcctccctatatggttaataatggacttgtgtaagaagattgcttcagagatgaagtttgtgattcacattagcatatttggcagtgaaagcgttacctttctcaatcaagcaggatatgtaagatctttgtgtatgcttttgctaaactttactgctgccatccctgaacttgacttgatatttttacatccccttcaagtctgcatcccagttttgtgtcatctacagttctgaagagctgccttgtgctttatcatcatccagggttgaaaagagccagatcattggagaatccccacagactgacagttttccctgaatcgatgcctgcttattgtgctcatgcaggtagctcctattccatctcacttcgctgcatgcagctcacatatttcagatgatccacaagaacattgggaaggacctgccaaaatcctgccttgctaaagtccaggtatactctcttccagatctcccttaactgcctttgcagattctatatcggagaaagaagtgaggctaatttcacaaacttattcttaccgaattcatttatagctctaataattaccacttttcttagatgtgatcccaaaacaatcctttaataaatgcattttagaactgcactgtccatagtggcagctacttgccatttaaatttaatttaaatgaattaaaatgaagcagacaaaaaatgcagtttctctattggactaaccatgtttcaagtgttcaatacctgccatattgggcagtgcagatagaacacttctatcattgcagaaatttctgttgaacagagctgttctaaaaccttgttttagaatcagatctgagctcacccgtctgcagattactcagtcatcatttgactgtttttttttttttttttttaaagagacagggtctcactttgttatccaggctggagtgcagtggtgccatcatagctcactgcagccttggactcctgagctcaagtgatcctcctgcctgtctcctgagtagctgggcctacaggtacatggcaccaggcctggacattatttaagtctttaagaaacatctacatgtgttttttcctgtcacctctctttttctccatttccttcaaaatcaccttgaaggcgactccatttctgtattgcccaaatcagtctacagtgtaggtgttggatgtggactttttttttggtttctaatgaggttgtgttgcagatgagctgaagccacctttgatattctaggatttgtgcctgaagaatagcgctttctgtcttgctgatgtttatatgactgctatgattgtcaagggaaataaggagaaatgaatgggatccacgttgcttggcccagcatacctgtttctgagtgctgttggagctgagaggcatgctcttggagaatcagccatcaagctgtcttttccagagtggatgttgtccagggcagttgcagagtgagcacactgtcaatgagtgcctggggtccttcatttatttctttacagcatctgtagtagaataaaattccagtgttaagagacaaaaaaaatgtgcccagctctcctggggttgacagtctcagttggtaaatcccatcccaagggggcagctcctctcctgtctgtggtttgcctgctgtcccccaggagccacactcaccagtttggtcagctggcagatgataagagggagagaatcttttagaaaacagatcctggagatcattgttagtggagaacttattatcaagtcaggaagaagaaaaatcattgttagttgagtgaatacattttaaaaaatgataaagtgttcgtcaggcacttgggatttcttgctcatatgctaataggatttttgaaaatccactcactgtttggaaacttgcttgctcagtgacaactgcatccaaatagcagatcatgagccaggtttgtggggggacaagagtgaagggagttcggaggaagtcgctctgggccaggaggcagggaccctggccaccagccatgtgacccggggcagatccttgcagtgctgggccttggttttggccactgccccctggccccccacttcccagaattattgtgaggaactgtgcgtgtatgtgcaggaactgggttaacatatctacttatggttggccgggcgcggtggctcacgcttgtaatcccagcactttgggaggccaaggcgggcggatcacaaggtcaagagatcgagaccatcctggccaacatggtgaaaccctgtctctactacaaacacaaaaattagctgggcattgtggcgcatgcctgtgatcccagctacttgggaggctgagacaggagaatcacatgaaccagggagtcgaaggttgcagtgagctgatatggcgccactgcactccagcctggagacagagtgagactcagtctcaaaaaacaaacaaacaagcagacaaacaaacatatctacctctggtcaacacagaaacaaggtaagcttttgttatcccctttgatagacaaagcaacagagcttaatgagcatgcatgtcacaaggaagcacaaattcacgcttattatttttatgggaagacccctcacttcctggtcctgatgttctctgtgggacctttggtgagtcagggaaggcctcacagtatggagacaacagtcccagcctctgacttgcaggagtgtggggactaagtgacactggaagtgtgctgcacacgtgcaggcctggattattaggagggaaggttagaaatcaagagccaggggaaaactgggaatagctggctggcttttcagaagggagtcattattttgtgcaccttgcaactcaggcagtgagcctggcggggaaagagaaatggctgctctttttttctgtccatgtgtcaccccctgtcagtgtgttactgggtgcaggtgtctcctctgatggtgtctgggcttttctttcccctcccttccttctttgcctgcttctcctttgctcctctgtctccgtttctctctccctgcattttgtctctttctattccttctttcttccttttttatcttcagattttaacctgttcctttcatcaaatgatgcttattaaatacatttggtgatttatatttttgtttctaagaaagctgatcaaaataactgtgtaagttcagtccgtgaaaagacaataatgatgacaggcaggcagcgctttggaggaaggagggttgggtcccgggtacccctgattcggtgggtgtttgtgcatagagtggtacctgcctgcttgaggataggaggctttgcagcttgaggtccttgctccctggtgtggggcatctgaagggctgtggtgggaagagggtcagaaccaaggccagatgcacccggagcttgctgcacgcacttctgggaggtttcctcttattttctctattttaatttctccattttctcttttctctctttcctctctttctggaattcccatctatctgatttttgacctattcattctatctttgaagtctctcttttctttcatatttttccatcttcttttctttctttctttttttttttttttttttttgagatggaatctctctctgttgcccactgcaacctccacctcctaggttcaagcaattctcctgcctcagcgtccagagtagctgggattacaggagcccgccactgcgcccggctaatttttgtgtttttagtagagacagcaatttcaccatgttggccaggctggtcttgaactcctgacctcaagtgatccgtccaccctggcctcccaaagtgctgggattacaggcatgcgccaatgtgcccggcaccatcttcttttctttccgttctgttttctgggatagttcaacgactttaaatacccatattgaaatgtttatgcttgctcttactttggctctctgagggctctttctattctttcgtcatttcttattttgtagcactgtatctttgtgtttctgcggcaatatcttcttctatttatttaaaggtattaatttgttattttgtttcttttttgacaattacttctgtttccttcactatcttttttcctttgctgtccttgtacttgcttgcctggattttcttcttcctgtttgagaccttcctcccagatctgtgagccgtggttgttaattcgcattgagaagtgaagcactgaaaattgactggagtgtctgcaacgtggctgcacattagcatcacctggaagcattaaaaactacctctcccgggggacagtctcagggccattggatgaagatctgttagattggggtctgcatattgataggttgataaataaagatattgatagagatcggtaggtagaaatacagattttccctcctcagcaattctaatgtgcaagcagggctgagcgttgtatagtcttgggtgacagtgccgggcctctggagagttggtataattaccgtgcagcgaaaccactctgcgttttactgtgccgggtgcctggaagactttgattgcatccatatgattctttttctgtacctctggcaaattgcagattgggaggaattatatatccctacagagacttcagtgaatgaagtttcagggacctatgagcaagaaggatgaactggcttcccggggaggggccagcagtccttctgccagacaagtcatcagggctgggacaggaagcatgggaagggcagctgtgcagagcaggatccaggaggggccacctggtggcaggtgtggccactgagcagcccctggctagggatggagctggagctgccagggaagctttgaggccaggtaacttggctcttgggctctcatgaagccaactgttcctctcccaagctctgagaaaacagtggagtcctggagtgacaggatatggtagctccataaggaggaggaacctgtagttggaggggcaacaccaggaggccagtgagcgatactctgtacctgagagaggtggccggaacctgggcccccacttgctgccagtgaccttgcacctgccacaccttctcttggagttttggcttctttaactgggacatgaggatcctgaccatctctgccaagcaggagaggaaatgggctgatgtgtgttgtgaggcagtagagactggggcataggaagcaaattgactctcagagtttatggtataaccttctcccacgctgtagggatcaggtttgcccctaaacctgcagactggctaaggccagggctggaaagggaaaaaagtaagcagaggacaggtcatgctgcaggccggcccctcacccctggtgacttgtgctcttggagtgagggcccaggagggggttgcctgcctatgcgtgtctctccctttccccctcctgttctgtggggctgggcctcacacggccattcttcgaaggaggaaggtggccttttgcattccctgttggtgtgttacttattgtcacttatttttgattaaggatattatatttagggagaaattatttgcattttctttgtaaatcatctgaagaattgtgcaacacaggagtgcattcgggaagaaaattcagacatcagagataaagcagagttctcccttggctgcatctacaaccttcctctccctagagaaccactctgtggttagtgtgttttccttcattatcttatataagcatttatgcatgtgtagatgtagatggctgtgttttgtttttatgcacatagaaggtatctgtgcattgttctgctgccggagttgttcagaacatggtattgtggagaaccacatgactgtacacacaggtctatcttagagacctgcctcatttgctttaactgctgcagaggcttccagggaccgtgtgtacagtactagatactgtttaatgaacactttcctactgatgaacatttaggttgtttcctaatgtttgctgtcacaaacagtgatgctggtgggttaatgcttctctaggggagagagcaagaagcagaagtgctggctgtcatctgcattctgcagtttaccagatactgtcaggttcccttcccaaatggctacagagtggtttggtccctgcagtgtcatcagttcccgacattataactttgcagatgtgatagggagaaaatctccattttattttttcatttcctggattatttgtgaagtcaagtatatttgcctgtgtttactggcacatgtattttctctttggtcaatttcccttttgtaatttttgctcagtttcccatggggttattcgtctttttcttattgatatctaggaaggtcacacgttcatgtgagtgtttgggtgtgtgggtatacaagcaaaaaaaggtttaatacatcctggatgctcattctttgatacatttacttcgactattttcttccagtctgttgtcttctgttttaggtgttttttttttttctcatccaggtttaaacattgtttattgttgtagctaaataattcactttatttagggattataagaaaatgtagaaagtaaatttgcattcttttcctttttcttagtattatgaaacttatttcttttttaaaaaaccagtctgttgaggtaagattgccatataaaagctgtacacattttttttttccagtgacttttttaaaaaatatatttaaaaacaaaaccggccgggtgctgtggctcacgcccgtaatcccagcactttgagaggccgagaggggtggatcacctgaggtcaggagtttgagaccagcctgaccaacatggtgaaacccggtctctactaaaaatacaaaaaaaaattagctgggtgtggtggcatgtacctgtaatcccagctactcgggaggctggggcaggagaattgcttgaacccgggaggcagaggttgcaatgagctgagatcatgccattgcactccagcctgggcaacaagagtgagactccatctcaaaaaacaaaagacaaaacgacctcctcccaaataacccccaaacaaacaaaaaaccagattaaataaaatttacagtgaatatacccagcaaacatttgtatgtgcaattcaatactgtgtctgttactgcggcacgaacctcagacaatatataagcgttctggggggtcgggagagtcccaagttttaactctgtggggtctaggaagacaagatggggaagtgagagaatggggaaatccgttttgtttatcttaattctttccatataaatatattcataaagaccaaaaaggaaaggaagcttgggatgttaaggtaataggagaataggagagtgtgggactttcccaattctgactgaccaaaaaatatgaaaggaattaattttatggtgggagaagagatttaaaaaataaaaaaaagaggatgggggccaggcacagtggctcatgcctgtaatcccagcactttgggaagccaaggcgggcggatcacctgaggtcaggagttgagaccagcctggccaacatggtgaaaccccgtctctactaaaaatacaaaaattagctgggcatggtggcgcgcgcctgtagtgccagctactcgggaggctgaggcaggagaatcacttgaacccaggagccacaggttgcagtgagccaagatcatgccactgcactccaaaaagctgtacatatttaatgtacaactttgtgagtttagagcgaagccaacccccatgaaaccattgccacagcgtgtgccgtaaacagatccatcacctgctcacgtttcctcctgcctactttattacgatgatgatgatttgtgatgagaaactcaacagaagatccaccttctcagcagatttttaactgtacaatacagtgttgttagctgtaggcactgtgctttatagtaaatctccagaacttactcagctcggacagctgataccgtgtaccctcggcccagcatctttccacttcccctacccccagctcctggaaacccccattctactctctgcttctatgagttgactttttaagattctgaatataagtgagatcatgcggtatttatctttctgtgcctggcctatttcacttaatgtcctccagtttcatccgtgtggctgtacatggcaggatttccttctttttaaaagccgaataacactccattgtaagtgtataccatgttttctttatctgttcatccctcaaaggacatttagattattcacatatcttgggtattgtgaataatgccgcagtgagcgtgggagtgcagacttctctctgaaataccgatttcagttcctttggatgtatgcccagcagtaggattgctggatcattcggaagttctatttttaattttttgaggaacctccatactattttccataatagtgataccaatttgtattcctatcaacagtgcacaaggattttcttttctgcacattctcaccaacgcttcttatctttcatccttttgatactagccattcttacaggtaatagtgtgttttgcatttccccgattggtcttttccttgatgattttttattgtcttatttaagaagggcttccttatactgagtatctaacattttagagtcacctattttacaataagtctttagtccccttgaaatttatttttgtgaatagcgtaactcagggatatatatatagcttttaaaaaatgagttgcaaagtttataacccattccccccaccagctgatttgacatgttacctttatcatatggtaaatcattatagatgatgagttgttctggactgtcttctgctggtctatttgtatactctcgtggaataaaaaattctatggttttatatccttcattgttcttctagagtgtttctgcaattgtttcctctgccatctgaattttattattctcattggaggttcttttggaattgcactgactttctaagttgatttggaccaaattaaaatacttaaaattgaaatatttactatattaaaatgcagtattatttgtttttatctgggaatgtagtgtatttttttcttgaaagttttgtacacttttgttatgttctttccctatatgctttatagttttgttgctattgtgtatgaaatattttttattattacattttctatttggttgttgctggtgcttaggagagccattgatttatgtgttaaactcatacctggccaccttgctaaacctttttcttagtcctaataattcgtccgttgattctcttggttttctataaagacaggaatattgtctgaaaaaaatgcctccttcttcccctcttccttctcaaactgtacacctcttgagatgtctctttgtgtttgtacttctaggtagggtaaccagccccagactgaaaggtgacagtgatagcagccttcctaatcttgtccctaaatttacaggggatacttttatggcgtcactataaaatgagatgttttgctgcacttggctgataaatatcctttatcaagttaagggagtttgcttcttggtctaccttttaaggtttattttaaatcaggaatgggttgtcgaatttgatggccattatacctttttccttttttttttttttttttttttttttttttttgagacagagtcttgctctgttgcctaggctggagtgtagtggcgcgatcttggctcactgcaacctctgtctccgaggttcaagcgattctcctgcctcagcctcccgagtaactgtgaatacaggcgtccgcccccatgcttgactaatttttgtatttttagtagagatggagttttgccatgttggccaggctggtcttgaactcctgacctcaagtgatccacctgcctcagcctcccaaagtgctgggattataggcatgagccaccacacttggccccattttatacctttttcatggaagtaaacattttctaattcacaataaaagagaaaaaagtataataaacacaacatatccattgccatatttgcttagatttgttgttagcattttattatatttgctacttctttcctttttgtcgattttttttttttttttgagatacagtctcgctctgttgcccaggctggagtacagtggcatgatctcggctcactgcaacctccacctcccaagttcaagcgattcttctgcctcagcctcctgagtagctgggattacaggtgcatgccaccatgcctggctaatttttgtatttttagtagagacggggtttcaccatgttagccaggctggtctcgaactgctgacctcaagtgacccacccacctcagcctcccaaagtgctagaattataggcacaagccactgtgcccggccttttttgctgaagttttaaaagttgtagccatcattatttggccatataagttcagcgtgcactttaaaaataagcacatcttcctacatttccacgagaccattatcatagtaacagcattcacagtaattcattgataacatttaatacccagtctatggtaaacactctccagttgttaccagaatgtcctctacagctggtttctttaccagggcctggtcactgcggagacagcactgtgggccctgatgtctccactccttctctaactggaatgcaccctcttcctttttgttccattacacctctctattgcagagactcacgtggaccagctgtcctgcatcaaatcccatcttcagcgttcgtctgattgctttctgggctagcatttaacttttctctctagctcttgcgcttcttgtaaatgggaatttcagtccaaaggcttgtgtgtttttgctgtgaaacaacagcagaatctcataggacgagaatttttcttcctgtttgtaggcagggtcagcaaaagggcaggtttgttcaggttgcaggtctgctggggtagctctgcctgacatgtttattctgagacccaaactagagggtaggggctgcatggggctcgtgttgcccatggtgagtcagaggaacacaggaggagcggatggaagcaggagatggcctgaggtatagccttggggcttgcaggtggacggttcccattccactgtcgagtatcaatggagtgggcagtgtgcttgtcccatggaggaggaaggggtatttgctgaatgattaaatccaacccaccaaagcatgtttagattcagactaaaagttcttggcaagaatacttcataagcggtggtgtatgcattctattgcagcatgtcacaattcacatgtaatacgtggttgtctcattagcaactgatctgactagttaccatttattaataagatgctgtgctgaacttctgttaacctcaaaaggggaaagcaccaggttcaaggctgaagaagagacccagagccaggaaacaagaattgggattttttttttttttttttttgagatggaatcttgttctgtcgcccaggctggcatgcagtggcgccatcttagctcactgcagtctccgccacctgggttcaagcaattttcctgtctcagcctcctgagcagctgggactacaggcacgtgccaccctgcccagctaatttttttgtaatttttagtagagacaggttttcaccgtgttagccaggatggtctcgattcgatctcttgaccttgtgatccgcctgcctcggcctcccagagtgctgggattacaggcgtgaggcactgcgcctggccaagacttgggattttattaggggcctgcatacaggggagacggatggtggtggattggaccagagaaccgccttatgtacagagatggtccagtgatgggctgggcgtggtggctcacgcctataatcccagcaatttgcgaggccgaggcgggcagatcacctgaggtcaggagttcgaggccaggctggccaccgtggtgaaaccccatctctgcaaaaatacaaaaattagccaggcgtggtggtgggtgcctgtaatcccagctactcgggaggctgaggcaggagaattgcttgaacccgggaggcagaggttgcagtgagccaagatcgtgccactgcactccagcctgggcgacagagcaagactccgactcaaaaaaaaaaaaaaagaaaagaaatggcccagagatggcgggctggataacatatcggccttcctgcagtcttgtggcagtgggctgggcaggaaagctgcaacttcttgccaactttatgcagtttatttagcatttctacttaacaccctcctcttaatgacccctacccagcaaccttcatttaccccaaaactcagggcctcaatgccctgtatggcccgtgttccataggatgttccaggggctcaaatgttcctcatagacaaggaacgaatctctgggttggccacacctgattccccagctcagagcacacactcaggtgcatctgccatacagggtccttctgagggtaggttcaagttatcgctgtcaggtgcatttaccctacagctggtgacagcttgagtcttcttttataaagtttcttatgcttgagactgacaagaaatctgtggctagttctttggcaccatgtatatgaacggccagttaaccctctgttatccattggtgatcctggcctgaatcagttaattcattagttgttgcaaattggtggtttcacaattctctcatactgttttcatttattagctgttattcttctgtaaagaagagattttccttatcacctggagctgttagaccaccctgaaatacagtatcgttagaacaggccgggcatggtggctcacgcctgtaatcccagcactttgggaggctgaggtgagcggatcacgaggtcaggagatcaagaccatcctatctaacaaggtgaaaccccgtctctactgaaaatacagaaaaaaaaaaaattagctgggcatggtgttgggcgcccatactcccagctactcatgaggctgaggcaggagaatggtgtgaagccaggaggcggagcttgcagtgagccgagatcctgccactgcactccagcctgggcgacagagcaagactctgtctcaaaaaaacaagaacaaaaaaaaccaaatccttatttctcttcaattgttaattttcagaataagaagttggcaatagccaattttaatggtatgatacattctcagggtgtgccatcttcccctttatgatataaaccatttttggtcatgacgtgttagtttttaatgctaatagtgaacctatttgttaaagtttgaggtaagatctttgcctctctcatgttggagactagtttgtgcttatcctttcataaaataaattgcttcagctttccatctcttttttgagatgtgacatcatggtaatctattccttgaaaatgtaataaaacgtgtttgtcaattcatctcggtctggcctttattaggttaccttgttattttaaaatatcttctatagctattcagtttttctacttattgagccaattgtggtaatttatattttcttagaaaatcttacatttcattcagttagatttgcaaattcattggcataaagttctgaaaagtattctcataattttataaatttttctgcatctgtaattatgggcttttcagttctaatgtttgtgttttctttctttttcttgatttgtcttatgatatgtattctttttatactgggccaactttcaattaattactgtcttaattttttttagtcttttatcttttttttctttttttttctttttgaggcagtcttgctctgttgcccaggctggagtgcagtggtgtgatctcagctcactgcagcctccgcctcccgggttcccgcattctcctgcctcagcccaccgagtagctgggactacaggcgcctgccaccacgcctggctaattttttgtatttttcgtagagatggggtttcaccgtgttagccaggatggtctcgatctcctgacctcatgatccgcccaccttgaagcctcccaaagtgctgggattacaggcgtgagccaccgtgcccggcctagtcttatatttttctaattccttcattttgattttcacttttatttcttagacttattttatacattaacactcttttcgtttttttttttaatttaatttttaagttttggggtacatgtgcaggatgtgcagcaggtttgttaggccggtaaacgtgtgccatggtggtttgctgcacctatcaacccatcaccgaggtattaagccccacatgcataagctgtttttcctaatgttctccctcccccgatcccacccctgacaggccccagtgtttgttgttcccctccctgtgtccatgttttctcagtgttcagctcccacttataagtgagaacatgtgatgtttggttttctgttcctttgtcagtttgctgaggataatggcttccagttccatccatgtttctgcaaaggatatgatgtcattcctttgtatggctgcatagtattccatggtatgtatatatgtaccacagtttctttatccagtctttcattgatgggcatttgggttgattccatgtctttgctattgtgaatagtgctgcagtgaacataggggtgcatgtatctttgtaacagaatgatttattttcctttgagcctataaaccagtaatgggatcactgggtcaaatggtatttctggttatagatctttgaggagtcaccacactgtcttccacagtggttgaactaacttgcattcccaccaacagtatacaagcattcctatttccccgaaacctcgccagcatttgttgtttcttgactttttaataatcaccatcctgactggcatgaggtggtatctcattgtggttttgatttgcatttctctaatgatcagtgatgttgagctttttttcatatgtttgatggccacataaatctcttcttttgagaagtgtctgttcatgttctttgcctgctttttaatggggttgtttgggttttttttcttgtaaatttaagttccttgtagattcttgatactagacctttgccaggtggctagattgcaaaaattttctcccactctgtgggttgcctgtttgctgtgatgatagtttcttttgctgtgcagaagctctttagtttaattagttcccatttgtcaatttttgcttttgatgcagttgcttttggcgatttcataatgaaatctttgctggtgcctatgtcctgaatggtattgtctagattttcttctagggtttttatagttttgggttttacatttaagtctttaatccatcttgagttaatttttgtatgaggtgtaaggaaggggtccagtttcaattttttgcatatagctagccacttcttccagcaccacttacaaacagggaatcctttccccattgcttgtttttgtcaggtctgttgaagatcagatgacattaacccacttttctaccaaaaaaaaaaaacccctctgtagtaaatgtgtatatttcctaatgagtactaatttggccatatcccctagttgtgatatctaattttttgttcatgtctaaaaatacatcatttacattttgaatgctttctaagcctcagttatttaatgtttaagaatttcccaggcatgtcatattttgttttgtttttgttctttaactatctttgtagcagtctgggtccactcaggagatgggaaccccagggggagcatcatatttaatagaattattaggtatgatgagagagtagctgttaagaggtggaagttctgtgtggtatcgtgggggtggagggagggggacctaagcaggggcagacctgggaaagccccagggaaggaccagcttgttagggaaggtgtggttcagcagtggagagcagggacagccgctggttcaggcagtccagcactggtctagagatgctgttggtcacaataggccaccctctggagtacaggctggggagcagtggcttgaggctgggcctgcggtgtgagttcgggcaccagcacgtccagaggtgccggacatgcagaaggaacgattgctcaacgcaggactctccagaccacgcgggctacatggggtttgtcgagggagtccagaggtggctggccatgtggagctctgggttcgaggcccaacaggtgtggccccaacaaggctgcagggttgcagaagaactaggtgcctctgtggcctgagccgggaactgcgggaaccgttttcctccagcaatgttgctccatcaccctctgcccagaaagcttaatgtgctcactctaaaggagaaacatgaccgggcccggtggctcacgcctgtaatcccagcactttggaaggcagaggcaggcggatcacgaaatcgggggatagagatcatcctggctaacatggtgaaaccccgtctctactaaaaatacttaaaaaaattagccgggcgtgatggcgggtgcctatagtcccagctactcgggaggctgaggcaggagaatggcgtgaacccgggaggcggagcttgcagtgagccgagatggccccactgcactctagcctgggccacagagccagactccgtctcaaaaaaataaaaataaataaataataataataataataaaataaaggagaaacgcttaagggaattctgtttattcagagaacatattgaggggtacattcagaattgggaggcaatgaattgataactgacacaacctttttgtcattcctttctaattgtcccattgtagtcagtgggtgtagccagtacagattctttgtagaatgtcacatttcttttgtggcctaatgctacataggcagttttggttaaacccatgtgagtatgtgtgtgtgtgtgtgtgtgtgtgtgtgtgtgtgtaaaacctccgccttctctatttgttaggtacggggttctaaataaatcttattgttatttaaatttttatatcccatctcatttttgtctggttaatttgattttaatctctcaatatgaatgtggctattaatttcaccttttatcattatttgcttggtttatattttgaagctatgttgtgaagtttataaaggtacatgatgctcttggtggattatttttgttattaatgggaatttttccttttatgcctttgcatactttgttgtttacattcattttgtctgattaatattgccatatgagccttctttttattagcacttgtctggtgtatcttttcctatacttttatttttagcagtcttcgtgccatttttttcaggtgtcatcagaagagactaagcaactcatggcttaattttctaaaataatctgaaaatctatgtttttcaacagatggactaaaagagagtataaagagcactgcattcatttgctcaggctgcggtaacaaaacacagacttggtgtcggaatccatagaaatgtattgcctcacagttctggaggctgggagtccaagatcaaggtgtcagcagggctggcctcctcgggccgtctctccttggccttgatgcccctgcatgtgttcttccttctgtgcctgttgtgtgcccctggggtctctctgtgtaccccaatttatcttttttttttgagatggagttttgctcttgttgcccaggctggagtgcagtggcgcaatcttggcccactgcaacctctgcctccccggttcaagtgattctctgccttagcctctggcaaaatgcccttttcaatcctccctgccattggctacttttaggatcctgctgattggtgcatgttacagattgctgattggtgtgttttacagagtgctgattggtgcattttacaatcctcttgctagctacagagtgctgattggtgcttttttacagagtgctaattggtgcattttacaatccacttgctagctacagagcgctgatgcattttacaatcctcttgtaagacagaaaagttctccaagtccccactcaacccaggaagttcagctggcttcacctctcacaaccaccccaagaaagttgagggtgaagtgcaggccatgcacaggatgctgtcttgatactgagaaaaggaaggtggtgttaaccacagaatttcatggccaggggtgagagttaatgtagcagaggggctctccttggaagggctgtctagaagaagagtgtgtaactctgggcaggataggaagaggtgacacctccatgagaaaagggactttgtcttttttgcccctgtctccccagcctgtggctggtgtgtgtcaaagaggcagagtcattcctgtgtagtcatgatggttagttttgtgtgttaactttgcccagctctggtgcccagttgatttgctcaaacaccagtctggatgttgctgggaaggtaatttttgggtaagatgaacatagtagaccttgagtaaagcagactgtccttcatatttggatgggcctaattcgatcagttgaaggccttaagaccaaaggctgaggttccccgaaggggaaggtcggcccccagacccccttgtgactcaagactggaatgtcaactcctcctggagttcccagcctgccggcctgccctgcagatttcagatttgccagcctctgcagtcatgtgagccaattccttgaaataaatctctttttatatatcctgttggttctctttctctgaaaattcctaatactgtagttttttcatctggtgatctatttggctatctcactaacttctgagttgggacagcctcagagtcagaagtcatgtgtctcctggaccctccatccccaaagcacagccccatgccaaaatatgcctttatgttagtagcactgcccagccctgttcagttttctgagatccagttcctacaagactgtggcactcagtacttttcatctcattgggttctgtgcctctggggctgttgcctctgagaccagatcccggatcctttctttgtgggctgctccacccctgctgtggaaatcacacagaaggcggacagtacatgtggacaggtcagacagacacactgattggccagctgcagcatggggagcatggactctgcccacagctgtggcgagatggctctgtggtgagatctgggctttcttgtgtgctgaggaatgggagcgtttgccatccttatccaagctgcatcactcagggctggcccctctgaggttgcactgtgggccccaccccagcctctgaacgagaattggcataccagccagatgcctaggtgatctgtgcatgtgctgcaggtggagaaggtctgcactagacatctccagaaggacgatctgggatcagggttagacaaggcccacgtctgctgcccagccctctcctctttgatgtcctttctgcacctgacacctcttcttgacattccctttccttggtttatgtggtaagacctctctgtccacaacaggaatggtcttacccatcttcttctcctaccatgtattaatagttccctgtgccttaaacccctgattcaaaacctgcttcctcaactctccaaagtcagccaagcgagaggttatgggcacagtcttccacaagactgccctcacttctgacaccagccccaaattcaggggtcctcaggcccatccttacttcttaccagctggtcaggggttcccatgaccagtcttaaattagataatttgctagaatgactcacagaactcagaacaccattatacttaacaatgacagtttcattatagcaaaaatttacaacccagaaccagacaaaagaaggaacacctggctgggcgcggtggctcacgcctgtaattccagcactttggaaggccgaggcagctggatcacgaggtcaggagatcgagaccatcctggctaataacggtgaaaccccgtctctactaaaaatatttttaaaaaattagccgagcgtggtggcgggcgcctgtagtcccagctactcgggaagctgaggcaggagaatggcgttaacccaggaggtggagcttgcagtgagctgagatggcaccactgcactccagcctgggcgacagagtgagactccatctcaaaaaaaaaaaaaaaaaaaaaaaaagaagaagggacacctagggtgaagtctgggaggcttccagatgcaaagctttggcgtcctcagagatgcattatcctcccagcatccaagtgtgacagtaatcaaagagtattgccaaaaaaggaacctcacctgagcttcaatgtctagagtttttatttgggattctttatgtaggtatgatgcatgatgaattgaatcagtgaattgattaaattgttggccatgtggttgagctcaatatctagccttcccagaagtcaggctggtagcccgtgtctcctgtctcaaagccccaaccctctagtagctagttggcctctctggcatcaccaacctccatcctgagtcatctcttttgcataaactttggaacgcaccacgaataacaaggacactcctatcacttggagattccaaggatgtagaggctccctccaaggtaccagaaggccagccaagttctttattacacaccaactgattgccatgacttagtggttaataaagagtggggcttggggttcctttagatttcaggcctgacacaaccccttggatatagactacatgaaatgaaagtgttaggaagggtgtatgcatgctatttgtttactttgaagagtgacacttggaaccaatgtcagttttacaggctgccctgacttgctggggcacagactgtgaagtgcatattcagaatgaatgaagtgttaccctacagcagtggctctcagacttgcaggcatcagaatcccctggagatcttttaacatgcagacttcagggtcctgcccctgagttttcattggtctgggggagggcccaagagtttctgtgtttgtggagttcccaggtgacactgatgctgctggcccagggaccacacttcaagaagccctggaatagactctgtggtgggtgtttgaactttggattcttggccataggtttttacattacaatgacagaatgggaagtttggcaggaataaagatgacttccacccacaggctcccggggaggtccttcttccctgggccctggcctggtgtctctgtctagcagctagctagcattcaggtcccaggtctcacattttggctggactttaatggcaattgatgggcaagtgcaggctgttcttgcaggggagggagtgctgcctctgcttgggctgctaggcttggggcctggtcacctggggccactgcccttccttcagtcttgccagacaggcagaggagtaagggcttgctaccggggcagagaacatcgaatgattgcaatcgtggggtcattaggattaattagtaaatagccatcagatcttaaaaaatagattcaggaacagcctgggagggcatttgggtgtggtttcccagtttgaggggaaagcatgaatcgactactatctcaggtagggctctggtgctgggaccctgctcaggccagttaagtgacagtggatgtggcctggaaatcctgtttctctcatgttcagtgagggtggaattaggggtgtgtgtggggaccttgggggcgccatgtgatgattaactgtagtctgtctcagttgtggaagctgctaatgtgtttttctgggacatcatcatgggatttttattattgatttcagcagggagactgctggctcattatgtgacaagaaatcgatgtggtgttccacgttcgaagcaggggttctccgtgacgtgcgggccctggaccagcagcctcagcatcccctgggcatgtgtgagcagtgcacactcccagcctccccctgacctgctgagccagaagctctagggctgggagccagaagccccgcaggtggctctgctgcatgggaaggaactgttgggatgcaaagcaggccagagaggacaggagcagacaaagatctgaagctgaatatggacccctcagggtgccagctgtcaccccggagcgcccccctacctggggaagctttggcaaccttcctggttgcaagccaaggcccagggactccaccgctggtgacccccttacctggccctggctgtgccctttggctcagggctgggcccgggaggctggagaggtgccagggttcattgccagaggctgccttgcccctcccttgtgtccttgtaggcagagccctcacccccctatgctttcccgccacccaccagccacacctccttgcccaggcctcagtgcctgacagatggcctgaatacatatatatatattttttgtcttaaaaaactattttttttaacatatctacagactctccccttaccaggtatttcttggggaagaaaatgttgcttagtagacaaatgtccccaggtctccttcagggaggatgagcatcacctgcattgaggaaggggtgcttcagcagagatgctcacttcaaagcgagcctcactagtagccacagggtgcacagctaggatgggaggcagtgctgctgagccaaggggtggtgggagcagctctggagaaacctggtcgggtggtgggtgaagctgcctccaccccagcaagcgatatggggcctccccactggactggggaactgtgtatgagggtttggggtgcagagacctcaggtggccttcaaaggaggggtggccagaggcccagcaggtgactcccacacctcttttacatcatctcctgctgaacaccccagagttccctgcttcttacagtggtaacatttgtttaggagttgtgcagtaagtagaccaggcatggtggttcatgcctgaaatcccaacattttgggaggctgaggcaggcagattgcttgagtccaagactttgagaccagcccgggcaacatggtgagaccctgtttctataaaaaatacaaaaattagccaggcaaggtggtgtgtacctgtcatctcagctattttggaggctaaggtaggaggattgcttgaacctgggaggtggaggttgcagtgagctgagatcacaccagtccactccagcctggataacagagagagaccctgtctccaaaaaaaaaaagagaaagttttgcataaataaagttaaattatttaaaataaaattatttaaaataaaagttaaattgtttaaaataagctaggagaaacttgctacttaaagacatcttttgggagaatttttattcagaagataatcatttatcaaagtgattgagtaacctgtaatttatccagtggagtttaatttaagcatttgaatttcatgtttacccttttagcagctatcattgaacccgtcttggtagctccaaagcacacttaaatatgagatgcagcccctgcctccattggcttatggactgggtgggtgtgtagccaccgtgtacagaaagttaaagatggttctagggaccaggcaaacagcctggggtgagttaccagaaggatgatgtgaatcatcgtgtgagattacaggttgcccatcaccatggccagtgcctctgagggtttgttgggattagaggggcagcttccaggcctttcaggagaggagggtctttacatgtcttttgtgggtgaggacctgaggcaagcagagagagacagccagagttacgtggggctggaagaaatcaggccagagtgactgggacccttgactctccttgttagagggtgtgtttgtccattttgtcctcttataacgtagtaccacagactgggtaatttataaagaaaagaagtttattggctcaaagttctggaggttgggaagtccaagagcatggtgccagcatctggtgagggcctttgtgctgcctcataacatggtggaaggcatcacatggcaaagagacagagagacaagataggggctaaacttaacctcttatgaggagccctctccctgggtaatggcattaatccattcctgacggcagagtcctcatggcctaatcacctcttcagcatactgtctcttaatactgttataatggcaatcaaatttccacatgagtattggcagggacttctgaaccatagcagagggactgccttccccatggatcctggtgtcctgcaccctgggcccagtccactctctggctggcacctctggttttgccccccaggactctgtaagctctagccaaggcagctggtgctgtgcttgccagctctgtgctttgacaacaacttctgccttccccacactgtctgaactccagggtctcctcttcgttttggtgttgggggactctggctcaccacagagctcctctccaggcacgtccctccacagcacctgggaaatccccttttctggctccaagtgacctatcttccgagggctacttgggaattcacagaacctcagctatggagaagctcagaggattgggggattgaaaccgtaggtcatccttgaatggttagcttttgaaaataattgtgcatttttccgtggtatgggttggtttcctgtcctgtctccacagtgctgaaccaaatcagcaacgctgcactttgcaactctgacagttgagcttcctggtcctgcgattagagccctcaagatagtactgaagcattaggtgaacggtggggacagaagcccagactctgtctggagtaggggccctggagggacacacacccacttcctatttggctctgtcctatatgcaggcattttttttttttttttttttttttctgagacgaagtctcactctgttgcccaagctggagtgcagtgaggccatcttggctcgctgcaacctccacctcctgggttcaaatgattctcttgcctcagcctcccgagtagctgggattacaggtgtgcgccaccacacctggctgatttttgtatgtttagtagagacaggatttcactatgttggccaggctggtctcaaactcctgacctcatgatctgcccgccttggcctcccaaagtgctgggattacaggtgtgagccactacgcctggcgcatgcattttttagaaggaccttgagatgatttactattgttgatcaaggaagaagatgaagcggggagatatgctgccttgaaagtgtcctttgagcatgcagccttatttcagctgtatgtcagggtgtgtgtgtgtgtgtgtgtgtgtgtgtgtgtgtgtgtgtgtgtgtgtgtgtgtgtgtatcagggttgctgctgaggagttgcattgcttccctaaggcccaccagggagattcctgtgagggggtcagacagggcctttgaagttttatgtgttattaaagaaggtcgtatcttattaccacaaagacctgggatatctgcagcagggagtggtagaggagaggctgtcaggccagcccttaacagcgtaactctctcattccttcctcagttcctccttatcctcctggcatccagctccccatcagaaactgtgaatcctaagatatgatgggaccatggacccttcacatttttgtcatattcattatagtggttctcagccttggctgcatgtcagccacccagagtgtccaaattctcctcacccagaaattctgacctcatggagctggggcaggatccaggaattgatattttttaaacctcctcaggttgattctagcatccaaccggggtttaggcccgaggaccacagcctgccagttttcgtgtggcgtgacctttcctgccgatgataatgctgatgatgtcaagcctagctgaacgctgatgggcagtgtctgattaatcgaatgaagtaaaaataaacaggttttaacttaatgtacctccccaaatctgtaaagagatccatggatgacatcagtgctgtccaggatggagtaagcccactatcgtccattccactcacggattagaactcaaaactctgaacagaatgaaaagcaaccccatcgggaagggggttggagcttgaatgcgcagcacattagaatagagtttctgtggttgggtttttttccctcctttgatctgagtgctgactgatttgggaaatagcacagtgggcagaggcagcaaaactctgtgagaaacccatctttgtggccagagggttgaaaagaggaacgctgcaagctgaagattaggagggatcactgttttgttttgtcttttcctctctcctggccctgccagacccagagcagtagcacctactaccctgagagaaaatccaactctctggttggaggaaccggttgttgcataaaggtggtgggaagaatccccatttttttctctttctcattctgctttgccctcagcaggggctgcagttgcaagaaactgtgaaagagtgtgatgtgttaggctaaaactctgggagagccccaactttatgggcagaggaaccaggaaaaggtgcatctggtagtagcggaatatggaagaaatcttggagaggggaaatctggaaaagagggtttatttatgtttctgaaccaactccatgtatgggatatacccagagaaccatagcaaaggctttggatttaagctgcaatagaaaccgtggcccgggtcccagacttaatccctgaatagctcgtgcttgaagccaactcacagagcacagcaaagggttttgaaaccgcactgacgttaactccatcccctaacgaaggggaaccagagcttgtgttctcaacctgagtggatttatcgtctgatgaagcagacacatgaaaatcaacattctctacattctcaacattctctctcattcaacatttttaatcagggttaaaatgtacatattaaagcgatctgggatgcaatctacaattatttgggatacaaagaagcaaaaaaatctgactaattcttcagtcaatcaattaaaaatattttttaaatgacccagttctcaagggaaaaggcaattaacaaatgtcaaccctgagatgacatagatgttgaaattatcaaagactttaaagtgactgttataaccatgttccatgaggtaaaagatggacagttctgaaattaacagaaacatagaaattcgcagcagggcaatatgaaaaaaaaaagaaaaaaataggaattttagaatgaagtaaaaatattactggatgagttcaaaagcaaatgtatatgacagaagaaagaatctaagttagctctaagtagatcaatagaaattatcctgaataaaagaaaaatgagtttaagaaatgagtaggccaggtgtgatggctcatgcctgtagtctcagcactttgggaggccaaggtgggaggatcattgagccaggagtttaagatcggcatgggcaatatggtaagacctcttctctactaaataaataagtaaataaataaaattttgctgagcctggtggcacacacctgtagtgccatctactcagaaggctgaggcaggaggatcacttgatccccagaggttgaggctgcagtgagccatatttgtgccactttactccagcctgggtgacagagcaagaccctgtctcagaaaaaaaaaaaaaaaagcaattattaaaaaaaggtatcatttacaatagcatccccccaaaaaagaaagaactacatataaataagaaaatatacaagatccgtatgctggagactaaagaatactgatgagagaaatcaaagacccaactcatggaaagatatatttatattttggaagattcagtatagttgtgaattctccccaaatcgacctatagattcattgcaatcccaatcaaatttccagcaggatttaaaaaactagatattgataatgggattctaaaatttatatagaaaaataagggatcaatagtggaaacaatggttagatccctggtgaaaaaatattcctgattacatgcgggagaatttcccagaagatgaaaaacaagggaactctgaactttgaataaagggcacatgatccttatggactttcttagttctctagggctgctgtaagaagtccacagactgggtggcataaacaacagaagcttactgtctcagttctggaggctggaagtcccagattgaggtgtcctcaggactggtgcctcatgagggctgtgagggaaagtctgtcccatgcgtctccgtttgcttgtggtggtttgctggcgatctttgatgttccctagtttagagccctgccttcatcctgtttgtgtgactgtctccacaattcccctctttagaggacaccagtcctattgggttagggcctacgcaaattactgtatgtcaactaattatatctgcagtaatccccttcctctctctctctcgctgtctcttcttttctttctttcctcactgtgttgccaggctggagtgcagtggcccgatctcagctcactgcaacctctgcctcccgagtttaagagagtctcctgcctcagcctcctgagtagctgggactacaagtgcatgccaccacgtgtatttttagtagagacagggtttcactgtgttagccaggatggtctcagtctcctgaccttgtgatccgcccgcctcggcctcccaaagtgctgggattacaggagtgagccaccacacccagctgcagtgatcctatttctaaacaaagtatattctgaggtacaggggatgagaacttaaacatatgaattttgaggggacataattcagccataacacggatgtggcttattttaaatctacacagtactgtatgcacttggaaatgactagaaaaatgtgaaaatcacagggcaacaagcagaagcagacttttccccctcgagtcttgtggccgcttctctgggggtgacagatttctttgtctctgaggatggatctggtagagggtgtatttagcagtgtacttctttgcacggggtcctggcagctgcagaagctgcgcccctttctccagcatgttaagaaaaaggtcagtgctggtaacgttctgtgttcagttgccctcttatctggaccctcgcttttcccctaaaggcatccaggagcaaacatgacatgcagaggtagactttgccaaggcaccgctatttccagaagttcttgtgggagagagttgacttcttactgttagacgtaacccaggaagaacagcaaataccggccaggccagaagtgcacacagttactctgttcctgttacggcattaatgctgctttcaggcgtggactacattgtgagatattgaaaatgccatttcctggagactagtattgatgatgaaggtctgacagcaattttaatgatgtttaaagggcagatcatcgccctttgcgtatttcgagatgaggatgcagtggggcagatgtctcagcatattgaatgcccagaaggaagaagttaggcccaacattaaccccaagcctcttccaagggctgctgagacttaacacccttcccaccgcagaaatgtcacctgacaggtatggctgcccaaggcttcctgggcttttttatgcttgtcttttttatgttatttgtctgtagaagtactatagccaggaatgactagaggaaggaaataggtaccattgtcccatcactcgaaggcagcccttgctaacgtcttaatgcatttcttcacagttgattctgtgtttatttgttgtgaataaatcataacaatacatattacatgctaagccttttgtaaatatttcagatgccacaaaattgtcttgtggaagtgctaacactgatttatctaggatcctgttattgaaggtttagtgtgtgctcaatatttttgtccatttcactgccgttttccaaagagaacacatccctttgtgaccctaagctaggttagagagccttgcttgacagtgttggatatcagtattgtttttggaagattaatttattagtgtcctttcagagcttgcggttgcctgtgatcttgaagtgaaatacttattcggtgacttttgtctggaatgcttgggctgattatacaagcattctccaggactgttcaaacccacatcatgtatagtgtatagtgaaagcaactaaattatatttgaaaggaacaaaataatattatctttacaacatgtgagaccaaatgggggacaagattggtgtcaggaacaatttggctgagtctgtttctcatttgtatgatacgttttcacccagcctgtattgtggtcactgaatagctatttttcatctggtctgctatattactagctcttctaagcaccagctaatgctattttcccgtgcaaaagaaaaacatggtttagaataaggacactggagctctttattgttgacaatgagcctttatttctcacatctaattagaatgtttcaggaggcgagtggtgagcacggtgtcgggggccgcattagctattgatttatgtgctgttatagaattaattgagtctggacatggagactcattttcttggacatgtagcaggtaatcatgcttctcctgtacatttgaattgctttccagatggtgtgttgtacaggatttatctttaatatgattgactagaagcaaaggacctgagtgtgtttgcatacatgctctgcaatgcaaagcccccagcccccactgtagagatggttaactctctcctggccacaccccccctgggctcatatggggacctgggccttggattgacactgtatgcagcaaagacagcgtcaaagggtcctggataaaggctctgggaggggagaaaaggcctatagtatattctgagggaaacagaataaacagcattacttattatgcaaaaccaggacataatgtgggttcagcaggggaatagttagtgtcttagtcagctcaggctgctatatcaaaaaacaccatagacttggtggctccaacagcagacatttatttctcacagctctggaggctgggaagtctgtgatcaaggtatgggcagattcagtgtctgctgaggtctgtctgctttctggttcataggtggccatcttctttctgtgtccacacatggtgaaaggggcaaggcagctctctggggtctttttcttctttcttttttccttccttccttcctctctccctccctccctccttctctctctctctctctctctctctctctctctcgtctcgcactgtcacctgggctggagtgcaatggcgtgatctcggctcactgcaacctccgcctcccaggttcgagtgattctctttgcctcagcctcccaagtagctgggattacaggtgcacgccaccatgcctggctaattttttttttttttttttgtatttttagtagagatgggatttcacaatgttggccaggctggtctcaaactcaagaccatgtgatctgccagcctcggcctcccaaagtgttgggattacaggcatgagccaccacgcccggcctggggtctctttcataagggcacagtcccactcatgagctccaccctcatgacctcatcactccccaaagaccccacctcctaatgccatcacactgggggtcaggatttctacatgtgaattttgggggcgatgcaaacattcagtctgtagtggtcagatgatatctattcagctgggaaataggatgtagccattaaaatgatacctatggagagcttgtgttgcttaccgcatgttaaaagagaacaacatggatttgtgtttacagtaaggtctcggctatgcaaaagagatgcacagataaaagactggaaagaaagaaaccaccaaacaaacactggctttctatgggtggaacaactgtgagtgggcatccattcctctctatatttcctattaagaacacagagcaaaacagattgtagtccttgttgctgggaagtaatgtgccctcagaaacagtcaccctctgagtacagaagtctgcccacatcagtttcacaaatgatgtgctagatgattagtcatatctccggctctctcctgccctcctacagggcagctgtccccatataacagttgtatccctagaaggagtatgcagttaaagtaattggagattctttgaccagacgttttgagagtctggcagcccggaaaggtgggatttggcagctatgtgggaccttccttcaggcactaaagggcttcctgaaaaagttgcttacacattgaggtgtgttaaatggaattctttatcataaggctgcaaactgcttctgtgcaaaaggcaatgtgttagttccttgcaggaatatgcttttagtgaactcaatgagataccagaaatccagtaggagaacactttctttgaaagaaccacttgtttctacctacgtttttgcccacctttccttctcacctccccttggccacaccccacttttgtgtcttgggaattatctgctgtgctctgaatagccccgtcctgccaggccacccacctttgcccttgtttgaagaagctggggacagttgtccttgctctccaccccctggagtaggggaagaaggcttggaatgtggtgggcctaggcttcttggtgagggccttgtatttgttgacaaggaggtcagatccattccctgggccgtcatcagagacctgcaagcatctacttagggcagagttttcaagtgcagtctttggacctccaacatgagaaccacctgcagctctagacctggcctttggcccacaaccttggaatcttgggccatgaacctgcacactctccaggtgggccttgtgcccaccaaagtgagcgaatcactgcattggaggagtgactcttggcttttcacaaggacctctccctgctttcctcagtccctccaagatgcacccatatcccactgcagggatgcaatttgcatacatagccagggacagtgtcatctggccacagccactcccagccacctgtgtcagcagagttccccgttcccatctaagacattcacctcatcaggcatctctcctggaccatttcattgacattttccttaactccctttatgtagtgtttatggagttcaggcctgcactggttgctctcttctttaactcgcttcaagccctgcaggcacatactgtcattttcagtttcctaaggaggggaaggccatctctccattaaatatcttgccccaggcctcacagtaaacagaggtctgaattgaaacaaggaccttcagtcttcatctttaacaggcgggctctttgtcttataccaaaagtgccccagtaggttccgtgtaattctgtggagtctttgaagacgtggctgccttctgggtagctgctgtgggtcccttaccctttgcactcatgggaaagagagctggatcagaatgtctgtggtgtcaaactcaggaaaagagctgccattagccagcgctagcattgtagtcatggtgaaaaacgggatcattaccagtccacagccaagccatattgcagcctgaggcaacaggaaaaatcaggaataccaatcctatcttcatttacaattttgatattttgttcatcatggatttattttgccttagttttgatttctaaagcattgcattaaaatattatttatttttgattgcttaggtttttggggcctccctgatctccccctggttcagccatcgtaaagtgaaagcattttcattgcaatgaggaataagtcaagggtgcctgttagtgccattgttaactcctcagggaagtgcagggcagggtagttagacaagatgaccacatgccggaaaggggaagcaaaatggtgacttctgaaagtgacatcatttacctagaaaaacattatcaactaaaaactattaggatttaaaaatagcttagtaaaatctatttttacaaaatcaatatcattttttttctgtatgccaacaataaccaggtaaatatataaggaagagatctattcgcaacagccacagaaatattatatttaagaaaaaacttaatatgagatgtctacagctataaagaaaattacaaagccgttgagagacatttaagacttcaataaataggaagatttttttgggtgaaattgggtaaaaagactcagtattgtaagtatgaataatttctgaggccggggcacggtggctcactcttgtaatcccagcactttgggaaaccgaggtggctgatcacttgaggcaggagttggacaccaacccggccaacatggcaaaacttcatctctacaaaaaatacaaaaattagccggagggtgatgacacatgcctgtaatcccagccactcaggaggctgaggcacaagaatcactttaacccaggaggcagagactgccgtgagctgggatcgtgctactgcactttagcctgggcgacagagcgagaccttgtctcaaaagaaaaaaaaattccctaaagtaatttataacttaaagttactccagccaaaatttcagtggaatattggggatacttggaaccactaactcttaagttcttttgggagaataaatgtgaaaatagcaggggaagatgacaaaatgagaataatgagagagaacttgccttatgtcgtattaaaatatgctctaaattcataataatgaaaatggcatggtactgttgctgggcagatagaaatgatgtagactagaaagtccagggacagatctaagtttatgtaagaatttagtgtatgatggctgggcggggtggctcacacctgtaatcccagcactttgggaggctgaggcaggtgaatcatgaggtcaagagatcgagaccatcctggccaacatggtgaaaccacatctctactaaaaaaaaaatacaaaaattagctgggcgtggtggtgcgcacctacctgtagtcctagctactcgggaggctgaggcaggagaatcacttgaacctgggaggtggaggtttcagtgagccgagatcacaccactgcactccggcctggcaacagagcaagactcagtctcaaaaaaaaaaaaaaagaatttagtgtatgacacgcagggtgaccagccatcccagttcctgtggaactgagggtttcctgggacatgagactttgagtgttaaagttgagatggttggtcactgtaaaacatgagaaacagaatagtctatttagtaaagggtattgggttacctgagtaaagctgtggtgcccacactttgctgtatattggaatcacctgggaaacttttatgaatactgatgcctagttcctatctgagacattctaggttcattggtatgtggtgtgacctgggcatcagggttttcaatgggtaacaaaacttgaaaatcactggggtaaccatcgtggagaacatgaagctgctccctaccttgtgtgtttacactttctgatgggttaaatatttcagtgtcaaaaataaaggattctagacagtgactggatttgcttgctccaagggaagaggtttgacccctcccatgaaaagtctggaacttctggagctagggacaggtgcagcacacagactcagggagtttcaggggagcaccttattcctgtgcctctaggaagggtggacattttccctggaagcaagcagatctggctgaggacagcctatctctgtcatacctaaaaaatacaggcacctcttcacatctcaacagtgaagtcccagatgaccaccctgactgcctccagctcaccataaaatcctctcccactgtatcttacactgcccagccatccaccagtcgctgaaagacatgcactggtgtctcaggggccctttgttgccagcaagagcaaagacaggtcacatgctatatcttgctgaaaagtgagttagtgttttggaaggtcaaatggaggaactaatttataccacacagaaaaaaatgtgaaatgggtgctatgagtgtaaagttcagtgatttggagggcaaattccagagatattccagaaagagaaaaaggccattagggagagaaataaaaaagaaatagcaagaatcttcctgtaactaaagtaagatgtgggacttgattcggaaagggctcaccaaatgaatctcacataaaattaatgagaccctcataaaattaaaaaagacccttatctagacatagtttgctggaatttctgaactctaagagtggagaggaaattgtatcagcttccagacggaaggaatagatttttgtaccaaggtaaaaagaatctgaatagtattaaaatgcacatctgcgagactgtaagctagaagatagtggaacagtgttagcaaattattgtgaaaaggatgcaatacaataatcttatacctagcaaaggtatcattctatgtgagatcagagccattttatagatacaaaagagttacctcctaagtaaacaaaatgactctaacaattatttttacaaaataaaaatgaaatcccactaaatagttcaagagaaagaaatgcaaaaagtataggaagcagtggtaagttatgaattgagtaattatagtccaaattatattgttgtcgtagtgttatacatctggaataaatttttctgaaatcatctgaaggcttggagagctaataggaaacaccagtggaaaataaactcctggttctattgtagttctcctacaatgtcctcagtgttttcatttttgaaaacttgaataacattttaataggatctggactgttccatgttactgtaatgtgtattttagtccttatgtcctatattggcctagagaatattttatttagtgttggtatacatatttatatgtgcatattacagattttatccccccgaatgacagagattttgaagttaagatagcaagagtactgtgtactttagtttgttctcttaacaaggatgtgcataccttcaacgtgcacagcttgatgtcagagcctggcgagaaacagggatgctgtagagatggcaccgctatgcaaggaatgggagctgtgtgctcatgtgccagtgatgtaccatctgccctttgccgtcctgacgtcaagacatggacgtctggttgcatgttagcagctgcattcagcacatgcttctgagagaccgttttgaggaatgtagttactggagattgtgtctgagagttgtggttgctaagtccctgacatcactcctgcagcctctctcttgtggctggctgtcctctgtgaagataagaaatctggtgacaagttatatgtggtctttgaggcagctcagtgttcttgatgtgtcctctgacacatctgggttgcagatgtcttagtgagtgctggccccttgttctcttctagggaacagctctttcgaattgtcctgccagtttcagggtttgcgaatggggtgacgggccctgcagggtccatctcagtgacaattttcctggtgtgggacatctttgctgtctgtgggccactctagggggagtgctgtgaattgctccgcataccagtgatgctcctgaaacacggccatggacaagcctgtgcaggtggcggagtaaacattgcttctttagatgtcaagtgtccttggagtgaattcacacgttggaagcatgtggctccatcagtaattgtgcccacactctgagtgtctggactggatgaaataattatctccttcttcgttcttttgggaatattcatactgctgtaaccgtgaccatctggtacactcagtctcataacaagatgtgttttgggcaccactacaaacaaggtgctgtgtttggagctctggggggatacacaatatggaaggccttgagtttgtggcctaaactaaagagacaagaggggaagaggaggtacaggaaggcaagatgagagcccgggcagtgactgctgagggtcactgatagctcctctttcatcttcacttcctgctcccatctgagcccagatccctttgcttctgccacctaaggtcctcactgagccacttctccactgtcctctctactgttttagtttaagctctccttttttttctttttaaaaattgcagtaaaatagacataaaaaatttagcattttaagcattttcaagtgtgcaagctcttaactggactactggaatatgtttttttaaataattgaactatcatgcaagcaaaaaggcatgtgtaatgtaagagtacagtttaaagaatatgacaaacatttggggaagcaattagctgaagaagtagaacgttgctgggcgtggcggctcacccctgtaatcccagcacttttagaggccgaggtgggcggatcacgaggtcaggagatcgtgaccatcctagctaacacggtgaaaccccgtctctactaaaaatacgaaaaattagctcggcatggtgggggacacctgtagtcccagctactcgggaggctgaggcaggagaatggtgtgaacccaggaggtggaacttgcagtgagctgagatggtgccactgcactccatcctgggcgacagagcgagactccatctcaaaaaaaaaaaaaagaagtagaacgttaagcaaacttttggacgtcctctgtgccactttcctgatgctagccccttgctttcccccagaagagagaatagccttttcactggtctccctgcctctagcctctagcctctgtccccacgccaggcccagagagacagggctaaaagaaaaaatgttgaaaatggctcagtgactgtgcacatgtcttagtctgttttctgttgctataacagaatacctaagactggttgattataaagaatggagatttgtttctcacagttctggaggctgggaagtccaaggtcaaggtgccagcatctggtaagggccttcttgctatgtcatcccaaggcagaggtgagaaggtgagggagaatgagaaagagagcaagagagagccaaactcacttttataacaaacccactctcacaataaagaacttcctcccaagataaagacattaatccattcatgagagcacagccctcatgacctaatcacctttcaaaggtcccacctctcaacactgttgcattagggattaagtctccaacgcatgaactttgggggacatattaaggccatagccgtgtggtttgggggataaagtgcagagtcctgggcactgggtccaggccctctcccagtttggcctgccaggtctctgcagctgccctgtcaccccacgatacctgcaggctgcggctgcaccctttgtcctcttctccccatggccgagcagtgctgtcccctctgctgagccctccagcctgccacgctggggacttgtgtagagcttttctgcacattgctcagcctggatggtccctgcgcatccagttcctcggtgaacattgttcagtttgagggggaagaggagggagaggatgggataagcctgaaggggaaggtacccaagatagtctttgaggggtcatggatttagattgggaagagttattgtccctcctcattggtcctcattatgtcttcttaatgaaagctgctcattttcttcgtgagagcaaacaacctgatcttctgaccatttgtcttggtcacctgggctacccaaactgagtgagaagtcaggaatgagccggtaggttcctggggagaggcgtgtgtcctcgtgagttgccggtgcctcccttgactgcttttcccggagctctgtgtgccctcgttctccttggtgtggatgcgtgttgttctgatgatgagttagcgggggtggggatggcgcactgtttgaacagatgtgccctcacatggctgcgggaggacgtggtgggaggtgctgtggtgaagtggccccacacatggctgggctttgtggggttttgactctgtccttcccaatgttcctccccacagtggctgcctccgggtgatgatggctgtgtgaacgactgccatggcccaccggaagcttgagagcgtggggagcggcatgttggaccatagggtgagaccaggtcctgtccctcacagccaggagcccgagagcgaggacatggagctgcccttggagggctatgtgcccgagggcctggagctggctgccctgcggccagagagccccgcgccagaggaacaggagtgccacaaccacagccccgatggggactccagctctgactacgtgaacaacacctctgaggaggaggactatgacgagggcctccctgaggaggaggagggcatcacctactacatccgctactgccctgaggacgacagctacctagagggcatggactgcaacggggaggagtacctggcccacagtgcacaccctgtggacactgatgagtgccaggaggcggtggaggagtggacggactcggcgggcccgcacccccacggccacgaggctgaaggcagccaggactacccagacggccaactgcccattccggaggatgagccctccgtccttgaggcccatgaccaggaagaagatggtcactactgtgccagcaaagagggctaccaggactactaccccgaggaggccaacgggaacaccggcgcctccccctaccgcctgaggcgtggggatggggacctggaggaccaggaggaggacattgaccagatcgtggcagagatcaagatgagtctgagcatgaccagcatcaccagcgccagtgaggccagccccgagcatgggcctgagccagggcctgaggactctgtagaggcctgcccacccatcaaggccagctgcagccccagcaggcacgaggcgaggcccaagtcgctgaacctccttcccgaggccaagcaccccggagacccccagagaggcttcaagcccaagaccaggaccccagaagagaggctgaagtggccccacgagcaggtaggaccctggctgtcctggggaagggagcagaggggcccgagagcaagggacctcagggtacaggccttgcagatgctgaagcgaggcggtggggggtgctgggtgcctcacagttctaatggtggctgagctcttcattggtccagttgggagacatgttgcgtggatgctccggccactcttaagctcaccgctcagactcaggactaaagccggttgagggctgagtggcaactcgtgtctcgcagaagacacccctcctcccaccctagaagagaggttcgatttcttgcccactgccctggtctgctcatggtggggcagtatgtgtgggagagcccctcaatcctcaggggtgtactcagaccagcagggcagtggcaaagacgtgggggtgctggtgctcacccactgctgcggccagtgttgggtggcctggtggctggggtcggggccagagtgcatttcacaatggacgggtctctgaaagcccgggggccttggcctgatgggcaatcagctgtgaatacctatttggaaaaggattttttgaaggtttgacaaaacctcggggaagaaacgcatgctaatgagggcagtggatgtcagcataactgtattttaattatagcaaagtcagcgtgcattctaataaacacatttgaaaagccaccttccaaaaaaagcctcactgtgagtatataaagaagatgtgattattggacttgtgtgaaggaacttctatttggccaattatgtggacttctgtcatatttttttacagccttaactgttaaatatttttttccgagaagagttcatgaatttgagtgtgtgtgtgtgtgtgtgtgtgtgtgtgtgtgtgtgtgtgtgtactgagagcttgggtttggaatggaaatcattggattttcagcacttatattttaattgactcctggattttcagcacttgtattttaatgtcttgtattctctctaaagaacgttaagtgtcagttgacttcactttgggggtgttcctgtcattcacagcaattccgtgtttacagggggctgtgggatgcataggagctcccatggtactagtgggtgttgggagagttcacccctaaggccaggaggctctggaccctgggtctgggctttaggccaaagcaaagtgtttctttggtctttagcagggcctgggcttgtcccacaacagtggtgaaggcacctcagggattgacgtgggctgtgcagagcgtgtgacatgctgcgtcttattgtgacaaatggcatcgctagccaagttcttgtcaaagaagattatctttagagcgtggtggggagtaagcaagacctgatattttctggttttgtgcttcatgctaaccagatggtaatttgggtaaaaacacagagatcttgcgattggagagctgggaggtaaatgagtgggaatgaatggatggatgggtgatagtagctgtttaaaagggcaggtggaggtaggggaagtccccagccattgtggaggatcaagaggatgtctgttcttcccagaagaggcattgaatgaaaaagtatgtcacttctccccctaaggagaatgtgtccttgaaggacatgctcttgtctgagacactggaaaagttcatttaaactggttaatgattgtatagcttttgttttgttttgtttttccctccctccctcctttctgtcctttcctcctttcctcccttcctcccttcctccctccctccctccctccctccctccctccctccttctctccctccctccctccctcctctctctctctctctctctctctctctttctttctttctttcctatcagttcacaaattaattctgtcaaggggaacacctgctagttccagagttccaggctgacaagtaccctggtgccaggggccctgactactctttctgaagactctaccaggcccgctgcacgtgggcagggtctccacattcttagatttgagtaccccattccagatgaggacctctttgaaacctgaccagaaagagccgtagaattcatcttgaaagcaagattttttatgaaggatgtgcactgggagatttggtgctgccttgcttgaaataacaacctgctttcctaagaacaatccccttcctcccctgggggacagccaggccgtgccaggagccaacaaaggcctggcctcaagcaggtgcacagggtgccatgtgtcccatgctcacctctctgatcccagtgctgtccacatagtgtagtgatccctatggttgaggctgcagtaaaaaaaaaatctgaagggagaaatgggcaatattggtcacttagatgctgtagactcctgtttttaaccctaacccagcagcattggcattactggggagccccgcccccacattgctgaatctgaaatctgcatttcaacaagatgccacattccagctgtgatgctgtaggagactcacttggaggaaattgtgtagcaaccctcccctctcttctactcattttacagcttgaaaaagtgtgtcctggatattttgaagaggactgaatagcatttagtcattgcacgaatggcaatagtaaaatagagttagaaaaaatgggaagatgaaaaatgtattctccatggtccctactaccctaacggatgagctatttcatcagtgtgccttttcagaccatagcattgagcataaatgatgtacgtagctgtcatcataacccagatgtatttttgtcatacagtttttaaaatctgatgtatgataaatgtttctccatgtcaccatataattttcatgattatttgtagtgacctttccatgatccatttgggcgatgatgtgctgtataacatatttctctgtacacactctaccattgagcatgcagattgtgagtggcattttctcttaggtgtaaggctgccacagacatctttgtacaaaccatgttttccttctttggtttattacctgaggataaatccccatgccgtacatcaacgttgaccatttcccctcgatgaccttgcctaattgtttcccttcttctgtggatgttggatgcatgccctttatcttttggggtttggatgcatttccatctcatagaagcactctctacactgtaggtgtgacttcctgttgcgtatgtcctcatctttagtacattttcttttgaattttggttatattattttcaccatctctgcagcatttttaagatgttaatgactcatctgtgacccctccacctcctttcggtacagagggatttaattggatgtttccttcttccctgtctgggtagatgtattcacagaggacattgctttggtctggtcgatacgaaaaatgagttgccggctgggtgcagtggctcacacttgtaatcccagcactttgggaggccaaggtgggcaaatcacctgaggtcaggagttcgagaccagcctgaccaacatggtgaaaccctgtctctgctaaaaatataaaaattagatgggcatggtagtgtgcaccagtaatcccagctactcaggaggctgaggcaggagaatcgcttgagcctgggaggcagaagctgcagtgagccgagatagcaccactgcactccaacgttggcaacaaagtgagactcccacctccaaaaaaaaaagaaaagaaaaatgagttgtgcctgtactaagaagtaggttgtgtggcctttggagccctcctgagctgtaggatgccatgcattttgaaaaggctccagtttgcagggagccctcccacctgtgccactctgctgagaccaagaggtctgcccgggggctgggatatgagaggcacaaaggtgatagagtttctaaaattgtaggaagacaggttggggaacagagatctacacttgaattattttagtaaaataaaaaaaggttatttcaaagcactgcaagtttactgaggaaaatttggaaaatacaggcaaaaaaatcttttgccatgtggcattgtagaattccactgtagagttttcaaatcaaagagacaaacctaggtcaggatttcccaaaacacgctcttagaggtgttgtgtaaacaaagtaccatttgatccttactattcatggatttgatatttgcaactttgttaacttgctaaaattgatttgtaaccctgaaatcaatactcgtagcactttcccagtcatttgtggaggtacagagaggggaagaatttgagtcacccaactctcacgttcccagctgaggttgaacaaggctttgccttcttgtttcagctctcatactgtaaacagctgttcttttcacaatctatttaatgttctttgcatttttgttgatatgtgtgtgtgtgtgtgtgtgttggtgataaaatggccctcaagtgtggtgctgaagcctagtgatcctaagcacagaatggctgccatgtgccttacatgtgctagagaagcttccttcagggctgagcgacagtgctgactcgtctatgctgccactctgggaggtgctaaagtaaacttctgtagcgtatgatgaagttaaggaaaaggtggaggaatggctaaatttgcagattcatgggacaataactgattaaaaaacacatagtggacaggtagaaaacccaagaactttactgtcttgtgatctagggtcagggaaatgttaaactcttctcagctagtgttttatgttaaagaaatattgcatataattaattatttataagaaatctatattaaacaaggtgcgtataaacagaaacacacataaaacaaggttctgtgttgattcattgacaaaaatgtgtcccgaggctcataggaacctaaccctgtatcgcccctaggagcaatgtattcagtattcatcaactcagtgctcagggcagctttacagaacataactatgtgaatgagaattggttgtatttggttggcaaatgactttgggaaactttgctgcaaagtttttcccttcttgggggtttactgatttctcacacacaagtagcataaagtcccacgttcgctatagcggagacaccagccagcctggccagtgcttcccaaacatggtgtatcagcaagcccttttccctccatgcagggtctgtgggagaatacagacccaagctttacaccctggggagtaaaggacccgtacacatgaactcccaaggcctctccctgtatgcttcagttccaagatgattcagcaaccccaaatggtgatgatggaaaggttgtcattgtgttatcatcaggacccttggcttctgcagatttaacctttcttattttgtggtttgtgtaaagtccgtgggtgccggtggaggtggcagcagtgttggcggtgactgccagcaccatgttaggggtgttaggaatatgatcgcagtaaatcctagagcaacccagagagagggagctagggttagtcccgtgttgcagatggcacagttaagtagctcacctgtgaatagactgtggactgtgttatgccaaaacccgtgcctctgaacagtgcataacacagcccttgaagaacctgagaagagaaagcgtccagttctgttcagtccgcgtttgagcctgcctgctggagggtgagtcagtgtgggggaactgtgcagtgttcctcctggagagtgatggtctcttctcctctgttgtctgtttccttgctgttgaaaggcttggcgtgccctgttgttctcagtgagtgggatacggtgccagtgaggtgaccagtagatacggaagcctccggtctgtaaaatgtccccatctcagtgctaacgtgtcctaagttcaccagggctcaggccacagatcaaacaagtcaagtaaagattgttcatgtggcatttttcttaatttttttgagctttgttgacataacgtattgattttttttttcatgcagtgattaaggaatacatgagttgggtccagcaaggctcgtattgtgtgacctgatggaattagtattactacacctacccatgtggccctctactatcaggcagtgaagcgtgagtggagggaggaccccagctgggcactggtacctggctcagtctcacagctccagggatgagcctgtggacctggcacgtccttggtgccttcccttgaagagagtagtttgctcatcagtgctttccctggggcaactcacccacactcctggggggcaccataagagcgtttgtccagcaccaaagatcctagttctgtgggtctgtggggtggccctggatggcatgttctctggatgcctctgggtggcctgtggaacataaagggtttggcgagggctggacggattgttttggagccccatcccacctgttaccttgtgacgtctatcaggagatacactgaaaaggtcagccctgcctgaaattctccctgtagagacttactcctttggaccttggagatttctggagctgcaggcattccttgtccaggacctccatggctaccgagttgaggtatttgatttactcagcaagtgtagaatagctccacaccttggaatggcaaaccaaatatgcgttttgattatttggggttttcatgatttctgtttatccctgacccagctggtgctttctagaaagagccttctgccaatagaaaaaagaagaaaaatcaatacatggtagccaacttaatacaagttaaagggaagcatggtcgagggccccgaggccacatcgaatgcagaattgtgcatcattgctcattgtagagatgctttggccgtgacttggcattcagtagaggcttgctttttgaagaaccttctgagagtgtgataggagtctggtgccaagggagagaaggtgctaaaagcacaggtaactgggtgtgtcccccaggtgggaggcagtggtaccgtgtgtgttctgagccacggcctcacacacatgccccgctgggcagcatatgaagtgagtgtcagtatctgctttacagaagaggactgagacaagagtggcatggggttgttggcacccaggcgccccccctccatcagcgtgtggtggggcagcaggtgtgcagatggggtggtcctgcacagaggggctttggggcttgcactgcgcccaggagggagtggtctggggtttgtctaaacctggcccacagtaggatggaacttgggaaagagcctgtaggtggtgctgagggcagggggttatggggggcattggggcatggtctgcctgggaaggggaaggtcctctccagcccccaggcctcagtggagtagtcggctccctcctttctgcagccatgcctcagattctagtgtcccttgccccgcccacccatggcgtcaggcctagcactcctgctctgcatacggggaggctgcacgggagggttcttggggtgctcctgtgtcccctgtcgtctgtactgaaccccttcccgtgcagctctgctcccagcactgtgacagggtggacaccgcacctcctgctactgattcccaggattgccttgaaaaataaaatcctacgggtgtgcattgacgtttcaatcctggctggctccgcatgagcttctgaacttgatgttcagaagctcagggcccatttgctgagtcagcacagctgccttctttgatttgtatgaagccttttgatgttttgatgacatgtcaccatgggtggctgttattttcagggagcagtttatctatcaggatctgggattgcttcgggtacttttaaaatctaggtaaagccggggtttctaaaacattgttctaaaacattgtcagggcagagcatgtaaagctctcccactaccactaatagtgatctaaaaagtgcctctcccctcaaacacaccctagtcctcggggagaaagcagagtgcggtggttaggaatgctggagccacagtcaggaagccggcatcccacccggctgcagcagcttggggcccgggaacattctggatgggccacctgtgccagcagccccccatctcgtggggctgtggggaggggagttgatctgggtcagtgtctgtatgggtggggaggggagttgatctggtcagtgtctgtatgggtggggaggggagttgatctgggtcagtgtctgtatgggtggggaggggagttgatctggtcagtgtctgtatgggtggggaggggagttgatctggtcagtgtctgtatgggtggtgcggggagttgatctcggtcagtgtctgtatgggtggggaggggagttgatctggtcagtgtctgtatgggtggtgcggggagttgatctggtcagtgtctgtatgggtggggaggggagttgatctgggtcagtgtctgtatgggtagggagggaagttgatctggtcagtgtctgtatgggtggggaggggagttgatctggtcagtgtctgtatgggtgatgcggggagttgatctggtcagtgtctgtatgggtggtgcagggagttgatctggtcagtgtctgtatgggtggtgcggggagttgatctggtcagtgtctgtatgggtggggaggggagttgatctggtcagtgtctgtatgggtggggaggggagttgatctgggtcagtgtctgtatgggttgggagggaagttgatctggtcagtgtctgtatgggtggtgcggggagttgatctggtcagtgtctgtatgggtggggaggggagttgatctggtcagtgtctgtatgggtggtgcggggagttgatctggtcagtgtctgtatgggtggggaggggagttgatctgggtcagtgtctgtatggatggtgcggggcatggagtgcttgtgcagatgatgatgatgatgatgagttttcagtccatgggaagctcatcgggtctgggggaggtgggtgggcaagtccctgcacccagtttgggtacaggccatgctgggcaggggtgaggacactagtggacctgtcctcgggagtgacacaaaggaggtggtgagccctgcttgtgagataggatgagaggaggaccaggactggtcagggccacactggagctgctgggggtgaggtcgggtaagggcctcccaaggtgcccccacgctgtcccctctgcagggccctcctgaatgtggcttgtgccctgctggagaagttctcacatgcctctttctactccagagtcactgatttgggagatggggcaacagctgcacagccccaagggctgccctgattttctcacaccgaatatctaataggaagttagctgagaagcccacacacctcttcttccaggtaggcaagctgggcctgggactacctgtctctcaccgactccaaatgatagccaagcctctcttaaccttgggcaccttttttccagtttccaccccgaattcacactcttcaaagccagctcctcctgctgggctgctcctgatgtggggggccggccctccctgcaaatctctggcatggcccttgcaaattggcacctgccacgtggttggcactgggactgcaaaggtgaaagtggcattatcctgcatttgaaactcattctagagggagacggatacatgagactctccccgcccccatccaggtgtggccaggctccagacgagttccaggcaggcttccaggacaggctccagagttagggacaggcggagaggctctgtgactttgagaggggctttgggaagtcagccgacaaggtggggatgaacatagaggtgtgtgggtgtcctcagcatggaaggggctggaatcgtgatgtggctttgagcctgaaacaagacaaagggaaggcgagggacatgggttgggggatggtgatgagagagagacagagggttccactgggggcatggaggggagccaggagagaactggggagctgaggggagggacattaggaaggccagatgtagcagggcagttaggagatatcttactggggaagaaagcacccgttggcggtggccacctgttggcggggtcccctgagcctgagcagctctggtggattgggaaggcagaggcatgggaatggtagatggacagtgtctatagagacttgcacggagggcccaaggaggtgccagcaagccgaggtgctcatagtgtgtgtgtgtgtgtgtgtgtgcacgcacgcttgtatgtgagatattgacttgcattgtactcatctgccggtggggtgtctagggcagattgtggggagtgagagcattgggtatgggacccaggctgtccacgtgcgtctgcttcttgaggccccgtacctcccgttcttgggcctccgtgacacctggcatcatgcctctcttgcaccagaggcttgagagacacccagttggcaaaatcagttagtctgtgacattccctaggaagtgcagggctcggtgcaagaagttatagaagtatctgtttaggaagaaagatcgcatggctgaacacgctgagatgcgtaatgtcacccatggtgtgcttgcccaagatgtgatagcgtggtgatggcagacatgggagttttaccccaaagcattcagatcacaaccagtgccagtcagttactatgaagacatgtgactatggtaatagggggctgacctattagaataactcctaatcctatgtcagataataccatgggcagctcaagaaaactacgcacaactcagacatgtggagaaaggagatgtggaatggaatggagccctctgggctgatagaggcctccaggacttgccacacccacgtctgcccccaattccccagtcagccttcacagaagagaagttggtctctctccagctgagaccaagccaagacccaaagtgctggagctgaaggaagtttgggctaggctcacagaagctattgtcccctcctccagtgtcaacagctacccatggtccaggcctccatctggtcctggtccttttaagagacactgggtgctgactcacttctgggtctgtcccacgggtggcctgcctggtctgctgtgggtgcagccagactgtgcaggttcgggagcccgaggtggacttcaggtagggagacgctgctccccaagagctgctcgggtgtgacgtcagggtggaggctgttgctgtgtgtggcggcatcagtcatttaccctctttctcattagcccctgtccttcggcccatgtgcttgcaggtggcctctgattctgcttctggagactgtctgccccctctgattcattcattgcggccccagttatgtgaaagatagcatgttcattattcattcattgggccccacttttagatatacttgtgttcatcttcgagagagggaggtcatccagccattccccagtcctcaaaacccactccacaggcaaagcagtggtgggtcagggctcctcttgctgcattgcggccttgtatttgctcttctgagccacaagcatagcgagaaagtacaaaagaaaaggatttcaatggtattcaccctgaaaaaggaagaaaattgtgacacaggctgcaatatggacaaaccttgaagacgtcctgctaagtgcaatgagccagtcacaaaaggacaagtactgtgtgattctacttctgaggcacccacagtagtcagagtcatagaaacaggaagtagagtggcggtggtcaggggctggagagagcagggagtggggagctggtgtttaatgggtgcagaggttcagttgtgaagatggaagcattctggaggtcatcggtggtgatggtcgctcaacagtgtgaatgtacttaatgccactgaattgtacacttaaaaatggttaagatggtaaattgtatgttatgtatacttaccacaataaaataaataaagaaaagaagaggtttttcagtgaataactggtttgaaccaatttggatcctctaaaaccaagttgagccagtctgaacccatgtagccattatcacaccgtgttaggctattcttgcactgctttaaagaaatacctggggctgggtaatttataagaaaagaggtttaattggctgacagttctgcaggctgtagaggaagcataatactaacatctgcttctggggaggcctcaggaagccttcaatggtgacagaaggcagagtgggagccagcacttcacatggtgagaatgggagcaagagagagagtgggggttggagggggaagcgccacacacttttaaacaaccagttctcttgtgcactcaaagtaaaacctcacttactaccaaggggatggcccacatcattcatgaaagattcaccccatgatccagacacctcctaccaggccccacttccagcattggggattgcatttcagtatgagatttgggcagggacaaatatccaaactatatcacccacaaagaagcaaaaacattttgggccaaatcaaaactatttagatgtagccacagtggggatgaactgtgattatacccattcaggcctgtggacctgtggacctggcgtgtgtggtcgtgaggcggtgggtcggcacatccctgggaggtttcaggaggacattcaagaccaaaatgagccatgagtaaataacacaaccacatcctgagtgggagtaggggagcctccccttctctcctaggtcttgtatgggtcatgatcccgccttggcaggagtggaaggaacagatcccacaggctgtggcttatggtaaagtgattgtggtcatgccttgtgagtgtcattaaaataaacatatatcgttaaatccaccatcaaataacagctatttctgccatcctctcgccttttccacaagtttaaatatcccagatattctactgtgtatattcctaaaagcagacaggtagatttagtaaagttaactggatcattggtaccttctttatagatcatctggtgaaacttgtttttcaaattatgagttgtagggctttgttttaatgtctgtagccttaggcagttccattgagactaagtttttttcttattaagactaatcttattgactggaactgtggactcctcgtattaggagaacagagatgtggcctacataaattagtggaagttaaatactgtagaaaatgctctctggaaaccaaagtctaacatcgacttactactggtcattcaatttccttttggcttgggcaccatcgttacattcatttttcagatgtcaagctagttttctcagaatgtgtgcagggctcgaggccaagtgtggaggccacaggggaggtcacaggtcaagccttctgggagaactgcaagcttgagcctctgataaagtcacgcgattgaattttagccccagtaggttgctgtcgttaaactgtgcacacagggcttcttgcttttaagttagcaggatggaaaaattgcggatgtttgcagcaaatgtgtagaaccagtggcagaagcagccatgctggcccctaagcaatggtattagaaagggttgatgaagattttctcatttgagagttgaacaaaaccaaatggaattctccctagttccgcagcactggtgggtgactctccctgggccggtctcagccctgcagaaaggggcactgtctgcttagcttggtcagcgcagggtctactgcagcagagtgccaggtggatcacagccctcttgtgggggaaggatgggcggagctcccaccttccccacaaatggacacagaatggcacctggtatgtgaggcaggtgcaggtgaccaggagaaggggctgtcagtggttgatggacagctgcctctgctgcctggatgacccaccccctcccctggaccatctcccactttgcctgggtgtcagtcactggagggttagctcagtacaagctggcggatgacctccgtagagcttaggtgaaggggctctcacagggcagtatgtttgagacccttagagggctctctttactcttgcttctcctattatttttaaactgtagtaatacacacgtaacataaagtttaccattttaaagtgtacaattcagtggcatttatcacaatgttgtgcaaccacctctgctctttagttccagaacattttcgctgcccccagaggagaccctgtatttattaagcagtcactccccattcttccctccgcccccagcccccacagtgaaaaatctgttttctctcactttggatttgtctattccggatattccataaagataggatcagacaatatgtgccctttagtgtctggcttatttcatcatcatgttttcagggttcatccctgttgtagtgtgtgtcagtactttgttcatttttgtggctgaatgatattccactgaatggctattttacattttattaatccactcatccactgatggacatttgagttgtttctaccgcatgattaatgtgaatagtgccactgtgaccatatgtgtacaagcttttgtgtagacacttgctttcagctcttttgggtgtatcactaggagtggaattcctgggtcatgtggttattcagtgtttaccgtttttaggaaccacagatgttttccacagtgacagaacattttacattttcaccagcaatgcatgagggttctgattactttcaaaggaaaaaaattaagcagccctgtcaccttgatggtttggtctctggcctcaccgcttcagctcctctggcctgatctcccagggcctgcttttgttcatgtgtgtgtctgtttataccctggctcatcctgtggagggtctgaggctggcaggatcactgggttctgtctccacattggaaggtgagctgtcctaggtcagggtctttgttgcatgcatcgtcctgtccttagcaagagctaccctgtgccatatgggacatacaacaggcacctgttcaggcctggccatgtgggcccacctttggatggtacttgacaaagcctcaaaatgcagtgacaagtttagataaatatgattctgttctgaaatgctgcactggacacagccatccactgcctgccctttacagggctctgtgaagagacagtgaacaatgaagtggaggacgtgtgcaggtggccccagtggtcggtgatggaggagagatttcagcagaccaagcacggagaataaagccaggccagagtgtgctatcagcctgtctgccccctagagctgatggactcagcaaataacagtatagggtacccagttacattcgaatttagacgggtataggattttggtttttcaagatgaaaaaacttatagtggtgagggttgtacaacattatgaatttaataacactgaactgtacactcaaaaatggttaagatagtatattttattgtatgtgtattttaccataataagcaattgaaaaaataagttgtatttcaggtagatagcgaataattttttagtataaatatgttccatgagatgtctggataccgggatgcaggagggactccccttcctcctcccattcacaggcctgcctagagatttgtaagtacagactgactggctgtttttcccagtgtgtcttgtcgtgatacttttaagccacagatccgctttgaaaagatatgatctcccccaggggagtaactattataagaacaaatactctatccaagcttccattctcctcaagataaacatcacaggagtgacctgaattgtaaagaggagtggaaggaaaagaacaataccgtaatgttttctgagccacgcagatgtcaggggacggatccaagggcgtctgaaagaagacgtccacgctgctgagtgagaccttcctctgtgctgctgagtgagaccttccatctgaccagggggtcatgctctcactgctcctgcttggagttctggtgctgtagcgggtctcggccgccccttctgagctgggtggaggaagaagtccctgttgaaatatcagatgagtagggatgatcgcctcttttgaaaacaggagccgtgaagggattcccagagaagattgtcatctaacggagtcattcgtccgcccaggacttctctgtcacagggttacgtttgggagaattttcacaggccactggggatggctgtggctagcctggctttccactgatgccctctatccctaacctcagctcctgacatggctgtcattccagagagtgcttggaagcatcctgactatgttgacgatggcctgagcggagtgagtgtgcactagtttggtgttgtttcatccaaagcaatgtgattatattgctgtactttcagtttcatcaagcaggcaaaatgagaattgacactttttaaaatccaagctttagtttcaccacctggagccaaggtgtttattagaaagatttattggcattagtgtatttttattacaagcatttatctctgtgctgaacagttgcccctgagtcccgtgtgctgtgaagagtctgtgccacaccacacattaattttctgtcctcagagctccggggacacacgctgattctcatgctgtgcctgccgccttctccgagtgatggctgatgtgggtttcaggccccactacagttactcagcgacagatgggaccccgtgtcctctgttggctgtagggagttgaggcgaccctggctggcatcttgttttgaggggtggctggctgctgtactttggggagggcataacaggatttaaatagtatctttatctaggatgcctggagccccaaatccatgtgggcctcccactgtgtgaatttcagatgctgccagccccccaaccccgccacccctgagatggaaattagagcaccagatgggctctcccaaggagaagcatcacaagcccaccctcctgcctctttggaaagtaaccctggctgtttattgtgagatgtggttgtcatggtgacaagtggacacccgcttgggagggagatagaggaaacgctgttatggaggaaaggtcacccctagagacaaccttgtgttgcccgtggacaccccatactatggcctccgtactggggagtcccatgggtagggcatgggggtgcagccatcagtctgtgtccccagccaagccttgagccctggcttgaagttgcatgaaggtacagtggctggcccagccctaacccgtggtggatgcagcccctgttgtgtcccccaacccctgacttatctggccgcctgatgagagtctgtcgccctacatctgtggcgctccctctgcctgacaaattaaatcccgcccagcttgcaggagggatgttgttaacctgatttcatttgctggtgggctggttgatttctttggggtttttttggagatgaccagcacctgtccagcaactagtaaggcagggaaggcctccaggaacccaagtccatgcagaagggcactgtgttggggaactttcagacaagtgggtaaaataccgacgtgtgctatgtgcaccttgaaatagcaaagtgtcctcaacagagctctctgggggatgtcccaaataaggtttactttaggagaatgtgagcggcatctgaggcgagattctcttgttgcatcctttggaagcttttgcttggtgttccttggccatagcaggaagatcagtgccagggatgggtgaggggaagaaaccttgcaggagcggtacctgggccagtctcagccctgcagaaaggggcgctgtctgctccacttggtcagtgcagggtctactgcaacagagtctcgggtggtcacagccctcttgtagggggaaggatgggttttgctcctgggatgctaggcttcgaaaagcagggcagtgtgccagcagtcccagacaaaccagagccgggcctttggtcatgccaggacagcagggtgtggtctggctaggcctgtgagcccctgtggggctcaggggtaggggcagcaggactgggggaggcagggaccaaccagacttcagaactgctgggtcccagctgcacccctgcaccacctcagctctaggaagggcagccccatgtagctttcttgagatgtagcagcagtgctctcccttctccctcgccatccttaaagcccggtgcccgctcccctgcatcccccactcccattgcctctgaaatccggtggtgtctgtgatcctggaggggaggcttagccagcaatcattccaactacctggggcacggcatatctgcccccatcagtgctgggagggtgggcccagatcctttaatttttctcaaaaccccagagaggcagagttccatcaaagagcaagacactgatagactaggacaggggatagggctggcagccatgcctcgtggcatcacctgactccgagagaagccagcccaacacttggggtctcagttttctcacctgtcaagcagggggaagaatattcattgtgtacacaagaggcttttgtaaaccctaaggtgctaggtaaattaggtaaatgtaactttttttttgagactgaatctcactgtgttgcccaggctggagtgcaatggcgccatctcagctcactgcaacctccgcctctcaggctcaagtgattctcctgcctcagcctcccgtgtagctgggattacaggcatccaccaccatgcccggctaattttttgtatttttagtagagacagggtttcaccatgttggccaggctagtctcaaactcctgacctcaactgatctgtctgccttggcctcccaaagtactgggattacaggcgtgagccactgtgcccagctggtaaatgtaacttttatcatcagtgtcttccttgccatcatcatattgttatttctcgataatttatttccagaaagttctggaactggacttaccatgcaggctccggaacctcctctgggaggtggacagggatttaagggctatggatctggcttctgtcttctggatgatataaggaactaaatagagaaaatatacctaaccttaaattttattaattgaagtagaagcagttgtagtttggtgtcttctttaagagaagacttatgacatgtacttggggcattttctatgttgtagtaacagattggctaatttgcatttattctcatccaagaatttaggttttttaaaaatatggcttttaactttttgggcactcttggtgggaacgtaaatagtactactgctgtggaaaacagtatggaaggtccttaaaaactgaaaaatagagttatcctatgatccagtgatttcacctccaggtatgtacgtaaaggaagtggaagtgaagactcaagagatatttgcacacccacgttcatagcagcaccattcacaatagctaagaattggaagcaacccaagtgtccatcaatagatgactggataaacaagaggtggcatgtacacacagtagaatgtgattcagcccttaaaggaaggaaattctgccatgtgcttcaatgtggacgacccttcaggacattttgctgagtgcaataagccagttccaaaagggcacatactgactgcttaatcactccacttacatgaggggcatagagctgcccaattcacagaaacagaaagtagaatggtggttggcaggggctcaggttggggttggggttgggcatattgaggagtttgtttaatgggtacagagttttagttttgggaagaggaagacattctgaaggtggatggtgaccatggttgtacgacagtgtgaatgtacttagtgccactgaactgtacacttaaaaatggtcaaatggtgaactttatgttatgtgcattttactgcaatcaaaagataacaaatttcaaaatgatttaaaataacttttttagaagtatgaaaatagaatattaagtgcatagcagtttaagtataattaaatagacgtctgcacacacacctatacacatacagacatacacatgcattttacaaaattgtatcacattgcatattcaggttttgcatcttgcatttctctaacatataaaatcacgatctttaacttccccgtttccaggtttgcaatggtctggagcagccaaggaagcagcagcgctctgatctcaatggacctgttgacaataacaacattccagaggtaatttttttcaaggatgagagttctgggctggaacactcatctaatgatggagtggcccaccgagttgtggtctgctcactttgtccatgatgttctcatcccacccggtgcctgggggagagggagtccaggtcaggccaagttggtgtcaccatatggtgaggaggtgagggcacactggcctgggaggagggaggagagggcctccctgatgttaggaccatgccatggagtgctcttgtgttgcagatggtgtgtgtgtgggggtgggggaccattggtactacttaattttataaaaagccattctattcattgtctgataaccatgttctaaactagggtttctcaacaatgacaccattaacattgaggcctaggtaatactttgttttggggactgtcctgtgtattgtagttgagcagcatccgtggcctcaacccactagatccttgtacctaccccatccccatccctgatttgtggtaaccaaaaatgtctccagacattgcctaatgatgtccctttgggaacaaaaatcatcccagttgagaaccactgttctaaatcaacaacaggttttaacaaacaatttcctataagctaacagtgctatgatggaagttatttcccctttctggtaacatagtttagatgagattatttaactttgatgaaataacgatggccaccgatggagtggtatccagtctcctttatcttgcttttaaagatgggcctggatggctctcatgccccctggttggagcgtcattgtgttggatggtccctaggctcccttctagtcaagatatgctagtctgagggcccctaagttttagatgatgggcttttgggccactccccaacatcatgttgcctgcagcagactggtttcctgtatggagctgacatcttcagaacaccatcactcatggggggtttgcttttctcattatggctcatatcacagccctgcttagccttcaccttgtgggctacctacttaacaattgttatgtgttttatttttccatatttcctaacagacaaagaaggtggcatcatttccaagttttgtggctggtaagtgactttgaattttatttctcaaggggcagttgcattttacatcaaaataaatggtgcttttagtttgggcattcacctgcaaagcttgtttacaaagcgtgcctacctaccagcaaggtgcttggccattgtctgtttgaacactgtgtagccccacttagtggggaggggaggtccagctgatctgcccgctttgatgcaaggaacagtagacgatctcctttaattataccctcactaattgcatcacagacgacactgatgactgaatagattgagatgtgtctttataagcagctggttatagctaacacttctgatcagggtggatataatgcattcaaattcaggctttttttttttttttagatcctttgtttttctttaccgttccaccctttttgaggaggttaatagtgcatttcaacattcagtaaagaatgaaactggtcgatatgttctgtgtcactcttggggatggggagcacacttgcctggctttgacggagctgagcatctggagaccttgcagggcccctgtaggagatccactgggtttgcttctagtgctccaacctcagagtaaagagcttgttcggcaggatttctgtctttgccaggaggatgtttcctgcccctgctaatgtgttataataaacaatgtgaatttcattaattctttcaataagctggtaattaattcttataaatatttatgggagcaaggtaaattagttttcagaaataaatgactttcagcccttcccatgctgcttttctttttttagcaaacaactaaagcctggggaactgaagcccccaaattcgcctttagagaactagtttgaaccaggctaatccagttccaattggttgaaactggattaactggctcaaatcaattttgactgttataactggcttaatgctgctcagattgggtgagaatctgttttaaaccatcagaattaatatcatgcaattgagatagacttggttccattttgaccaattcagataggctaaaatgggttttgcccagcagtttacatgtggttttaggtacattttatctggttcaaattggttttcttcaggccacagcaggttatgatgattcctggaagagaccacactccccacattcccgcttgtagtgtttgattgggttcctggtttataggagctggcacctcgtgagcagggcgaatgcagtacgtcactgtgccattttccttggcaggcagaagccagggtggggttgccagtcacactgctccagtgaggcagggtctcctggatccaagaagctcacttgtcagtgtatcatagtgtcatctggacagaactctcacactaggaggtgatttagacattaaattccccgacccttgaaccaatctcatatctgcagggagtgggatcgtgagggatcgggaagcagtgtcagtgcctggggtacctcggactctagctcctggcatcccagaagacttggttccctgcaccactcagactgttccaaagcaaatccaaacaaggccggtggcttaaaacaattcagacaggctaaaactgctgtgaccagctagaaccaatgtggaaaacctgaatttatagtttcttctgtaggagagaagccctttgattgttatgaaaacatagaaaactgaagcaaaacaacatcctttactattacagcatttatatgcagcgaggccttcatggaccaaaatcttactcagcaacaggaagagatcatcataatggtgatgccaaaccctagaatataatggatatgggaaaagtttctccaaattaaacaccgttatcagtttgaatgcctttgggtacaagtatcaaaatccccacctaacgttacacaaataggtgtgtgtcttacataaagaagtccagggttggacgtggtggctcacgcctgtaatcccagcactttgggaggccgaggcgggtggatcatgaggtcagcagatcaagaccatcctggccaacatggtgaaaccccgtctgtactaaaatacaaaaaattagccaggcgtgatgctgagcacctatagtcatgctatttgggaggctgaggcaggggaatcgcttgaacccaggaggcggagattgcaatgagccaagatcacaccagtatacgccagcctggcaacagagcgaaactccgtatcaaaaaaaatataaaaaaaatattaaaaagtctagaggtggccaggcacggtggctcatgcctgtaatcccagcactttgggaggccaaggtgggtggatcacaaggtcaggagttcaagaccagcttgaccaatatggtgaaaccctgtctctactaaaaatacaaaaattagccaggcatggtggcgtgtgcctgtagtcccagctacttgggaggctgaggcaggagaatcacttgaacccgggaggcggagcttgcagtgagtcaagatcatgccactgtactccagcctgggcggcagagcaagactccatctcaaaaaaaaaaaaaacaaaacaaaaaacaaaaaaaaaaagtccagaggcaagaggccgccggttcgatggctctgtgatgtcaggattggcgctgttgtgtctcttggcctcctcttcaggcttgtcacctcatcgtcacacagtgtgtgggcagccccagccattgcttctcgttctaggcaggaagaaaaaaggagaagggctgaagtccacaccagctggacgtcctccccttgacattaggaaagcaaaggttttctgtggattaagaggtgatgacttctctgcatgagaatcggaccctctgttacctttcatagtgtgctccctgggtaacctgaaaggcagcgtgtcagctgtgtctccaggcaacattgcttatggtgagatgctctttttgataaactgtatctagatgggaaaattctaatgcttgcggggcagggcatccagggctttgagcttctcacagtggtgactttcgtgactggcatgtctcttgaaggtgaccctggaagctatgccccacccatggggtgattgtgagagatactggctgctgggagcatgaggctcttagaccagatgggttccacatgcccttcttggtgggagttttgtacccttgcagctgacccatccagggagttctgtaccattgcagctgacccatccaggggcccatgagactagctgtgtgggtgcagtgtggactcccatcagagagtccaggaggcaaactggcgtctgtcttgttcccttggagtagacggccccatgtctagctgagccttaggacactgcatgcttctgaatatctagttgaaccttacttagaagacccagaagcctcttcgacacactgcttatttctttgtggccagagctgtgtcacatgaccagcctctcagatgttagtgttggccagacaatcaaaccctgggctttttatgaaggcagggcaggtctggaatcagccctgggtgcctgccgccacttcccatcccactgcgggcccttccagcctcctggcgtgtccagtgctgaggctgagtatgtgagttcctgggaagcccctgtgtaagggaggagcagctcctccaccctatttgtgtctgagaagttgccctgaagggaaatgttcctggagtattcatgagtatttggtctcagcttatgccttatttcatatcagataattgttgataataatgaaaaaaataatagtaacaatgcacatgataccgtctgaaccctcgttggggcctggtgtccactccctgtgccatgcagcatctctctatttcatgtcgcctggtcaaccaccacgtgaggagtaagtactttcccccgtctgataggttagaaaactgatgcacagtgaggctaaagtcacttgtgtgcagtcccatggctgtgcgggggacagagcctggacttggacccatgtcttggtgcttgacacataaactcgtagccgaggtcattcctccctacccagcatgccttcatataccaggaataggtaagacctgtcaggtgctttctttgagccaggcccagatctaagtgttttaagtatatcaacttaacaatcactatatccacagctcagggagagtgaatcccgggccgaaggtcaccaggtagcaagtggcagagttaggattcgaaccagtctggaatctgagctcatcaccacactgcactgcctggcgaccctcacgcagtgggtgaggaagaaccttcacttagagaagacctaccatgcaggtgccagagagttcagtggaggggagcgttccagatgccagagctcctggccttgtcaggcgcaggatcacagccttctctcagcagaggcattgtgaggaagggcctgccacaatcactgtctgtggaaagttctcggggtctagcgaccctctcagactgggaaggttaacgctgcagagaaaacctccttatgaaagtgcggattgcacagaggatgcactgcctgtcctgcggggaggaatccgaaagcagccaccctcaagatgtcccctcctacaggacgtggtgtctggcagcagcttgagcccaagctgcttagagggtcactgcctctggatgagtatatgtgaatgaccagcttttctatacaggtaaacacgtgctcattaaaaccaaaaggctgatgttagtcccaagcaatggggcctaacagtggcagcttcagtacaaaataacaaagactggtaaatcttactctgctttttgtactttgttctcctcatccaaagctcatacaggatgttttgaaacccaccaccccaccagcagcttgaggcttatgccaaaatgctgccaggccttagggtcctggggtcctttacagcctgtctatagctcatcaacttgcccagctccgtgtggatcatgtggaaggcatggagattacatgccccagacctggagctgagctcacctatcaccccttccttctctcaggggtcctcacagtggtaaagctgctttgttggtttcatacagtgggcacatgggatctgagacttagtttgctcttaaaataggcagttggggtgaacctgttcagataagactcttaaagtgaagacatctcccacctcctcctctttggtgtatttgggtgggggatggacgggaggaaggtcaccctgtgggaccagaggggatgtggcgcattccaaagaggagttatggaaacccagatgactttcctttttctacaaacaagatcatgtttctcctgtactacatgcagtcagcaggaatagggattcgtcgttttaaaatctgaacttttattcactaagtagaagttgttaaagatttctcagaatagtgcttgtatcagaccaagagctgcaagagttaaaaatgagaaatccccacagtacctcttgttctgcctatacatcccagatccctagtccttctgtatagtggaagccacttacatttcttgtgaatttctccaggaatttctcagctcatccataggcccttttccttaaatagacattgcactggccacatggctctgtacttagctttttcctttcttgctagatcttggaaacagcaataggtccacctgattatttaagcggcagcacaggatcggttgagtggatgtgggatggggtattaaccagcccccttggactgattgttgggagatttccagtcagtgcagcagtgaacagccttgtggctacgcctttgtgtttgggtgtgggttcttttatggaggcggttcctggctatggcaggggtacaggccaggagcacagcaactctgatagacacgggcagaatgccttcccaaggggggacagcgtacgctgctgttggtcatgtatgagagttggttacgtatgaggttcccacactgttaccaacactgcatgaccggctgtttgatataagctccaggccgatgggtgcaaagaggtgtcttgttgatttcacgtgtctttcataataagtgaagccaaacactatttcgtatgttcataggtggtttttcttttcagtgcactgccagtttgtttcctgtgctcattcctctgttagattttcacccccagctttattggcgtataactgacaaataaaagttttgtatattaagtcatacaatgtaatgtattgatataagtttacatggtgaaatgactaccacagccaagcgcattaacatagccatcacttcacatagctacctttttgtgtgtgtggtgagaacacttcagatcgattgtcttagcagattactagtatacaatacaggattattaactacagacatttactcatctcataactaaaggtttgtaccatttgaccaatatctccccatttcccccacccctcagcccctggcaattgggaatttgggtgtttcttattgatttgtattattctttacatataaaggaaatgaaccctttggtttgtactgtaaaagtttaccccagcttaccattcttttcttcttcttctttttttggtatgctttttactttgctaaacatgtcatttagtcaaatatatcagtctttttcctttgagcttactgagtttttgaggttagtgtgaccatcacactcctaagattatttttgaaaataaagttgttggccaggcacagtggctcatgcctgtaatcccagcactttgggaggccaaggtgggcaggtcacctgaggtcaggagttcaagaccaggttgggcaacatggtgaaactccgtctctactaacagtacaaaaaataaactgagcgcagcagcacgtgcctgtaatcccagctactagagaggctggggcaggagaattgcttgaatctgggagttagaggttgcagtgagccgagatcgtgccacagtgctccagcctgggcaacagagtgagacaccgtctcaaaaaaaaaaattaattgattaattagttaaataaaaagctgtcttccaggactttggtattattttaaattatttaaataattgatttatctggaatttatcttggtgtatttatacaggaaaagttacattttaggcattttgtcccaatagctagccagttatgccagaactatccaaggaatctttcccttgcaagtttgaaatgctgcctttaccgtacccaaatcgtcatgtgggtctcggtctgtttctggatctgttacagggacggtccattcaggttccagatccaggctgctttatttactggggatttatggtgcattttattacctggtagggctactttcagaccttgccaccatcattccatttcagatttttttcctaggtatttttgcacttttatttttccatagtaactttaaaactagcttgtctggttattcactgcaaactcttttgtttgttttgttttgttttgagacagagtctcactctgtcgcccaggctggagtgcaatggcgcaatcttggctcactgcaaccttcgccttctgggttcaagcgattctcctgtctcatcctcccgagtagctggaattacaggggtgcaccaccatggccggctaatttttgtatttttagtagagatggggttttgccatgttggtcaagctggtcttgaactcctgacctcaggtaacccatccacctcagcctcccaaagtgctgggattacaggcatgagccaccgcgcccgggccactacaaactcttactggtatttttattaggcatgcttaaagtctgtccatttaggggaaaaaatgtcagctttacaacatagtctttctagccaacaaaggatttatctgtccacttgttcaagctcatttatcttcatcggtaaagttttttcataaaaattcaacacatatcttgtttgtctgtttcttgttgttttatcccttttattgtttttgtaaatgctgactttcattatttttcaacatgttgctgtttgtaggtacaaagaaagctatcgatttttatatattaaatttgaaaccattgccttagtgaattctcttattttttaaaaatagatttttagttgttttcttgagtttttcctggcatgcaatcataccatctgcaaacaagaatgatttttgctgcttcctttcttgttttctattacttcttcttgcttaatcagattgggtagaacagaaggaacaattttacataatagtagaatatggcttcctaaaaataacacctttttgaaagatctatgcttttaattttgtcataaaaacttcaagcatatgaaaaaatagcttcagtatttacccattcatggctagtggtatttaatctacaccctgaccctttcccagattattctaaagcaaatctcagatcttacatcatagcctctttaaatatttcatattgtatctctaaaatataggagttctgtttttaaaaataatttcaatgctgttatcacaactaaagttaatatttgtttatgccattaaatatttgtttttgtttgcattttcccagtttacagggcgctgtttgaatggggatccaaacaaaacccgtctattgagattggtcaatgcatttcataattcttttatgtctcttttaggttgtccatccgtctcttttttctgtcttacaaatttttgttggtgttattgtggaagaatctgtcatttatcctgtagattttcctgcagtgtggattttgctgattgcatcttcatggtgttgtttaatgtgttcctctattctctgtgtcctgtaaaatagtggttgtttttagacatagaggcttgatcagattcagtttgattgggcaaaaactttcgtacatatttttgtgttgttctattgaggcacataatatctggtcatctcttttttggtgatattagcaaccattaatgatcattgtctagatctagtaattgattagaagttgccaaatggtggtgttctaatttcatcatttcttcttcattagttagctggaattcttctatgtagagaaactttccctcaagtatttggttaccctgaatattgttcatataagaaaagcagattaaatgcttgatttcttctcttttttgaaaaatttaaaaattaatgagttggctgggcgcagtggctcatgcctgtaatcccagcactttgggaggctaagacgggtggatcacaaggtcaggagatcaagaccatcctggctaacacagtgaaaccccgtctctactaaaaatacaaaaaattagccaggcgtggtggcgggcgcctatagtcccagctactcaggaggctgagacaggagaatggcgtgaacccgggaggcggagcttgcagtgagccgagattgcaccactgcactccagcctgggcgacagagtaagactccatctcaaaaaaaaaaaaaaaaaaaaaattaatgagtttccccgacagcctttaaaagataaccggtgaggttgtgtatgttgttgttagcacagttgatgtgttttgtgtgtgttaccatgattattggtgctcaagttttctatggccaataagagcttctttaggttgttttctgagtcccgtcaatgtgaacccagtagtctttgattgtttcctttctttctggtatattccaggatcatcttaaatatttcttgccccaggtctggaaccagttggttctttctccatggagccctgtgaaataacatttagagactgtaatctgggtagtgtggttgctcgttgttgtagatttggtgagagtgtatatgtctatgtggaaggcgcctcctaaatggcccccaaggacccctgcctcttggtattcatggctgtgagtccttccctccccctgtgtgggggatggacttactgagctgcttctattgaatagaatatggtagaagagatgggatatggcttccaagatcaggttacaaagagatgtggcttctgtctcagcttgtcctttcttgttctctcttacttgttccctctgaaggaaccaagctagcctggtgtggttggcagttgccccatccagaggcccacgtggcacaggactgatgtttctggccagcggcctggtgagagaacttggaagtggatgctcccctcttcaggcattcagatggctgcagcatcactgagtaccttgctgcctgtgacagacgagaggtcctgagccaaagtcacccagctaagccacacccagattcccgatccacagaaactctcagataatccacggttgttgttttgagccactaaattcccgagtaatttgttatgcagccaacaataactaatacacaacatattttttaagatcaaataacgtcatgattcctaatgatactttgtcaggtttataggttctaacatttgtagtttctttttcctgtgccccaaattcctgttctcaaggacaccagcataattttgcattggttttattccattaagcttacagcagtctcagaataacaataccaaacactgccaaggacacatgattgtagatacagattatgatttatttgcatttacttttgtgtttagaatacatcccacaagggatgtacagtcagacaactgtgttttaaaatattttggaatagatcacaactggatacacttttagattcattggtttcatttttctcttagttatttggactttgctttttccatttaattttgttttataattatataaaataattacatggtatgaaattcaaataaacaacacaggatgtatgcaaagaggtcagtttcttcccctatttatccccccacctcccaatttcttcccttccactataggtaaccattttgagcattttacatatttttattgtaagcatgtcttcccctttcttaggtaaatggtagtggattagactcccatatctccatcttgccttcttcacttcacactaaaccctggcggtgatgccacagctctgtgctgttcacaggagcatggagaggatgttctgcagaactccactgtgtggatagatgtctcctgttcaggagtgtttgggtggtttccaggtttttgctattacaaatagtgctgctgcagtgaaccgcctatgcatatgctttttcccatttttgccatttttttttaaaaaaaattatttattatgctttttctgggaagtcattctccccactgcaagggttaggatctgtcttgggcaactctgtgcgttttcttgagcttggctttgaccttccttccctgactctctgttgtggcttctcttcctcccagcatccagtgacttaatcttgctcattgggtgtctaaagttcaacactgtggaacccccaaatcccttttatcagtgacaaagcctgtgctgcaggcccaggtgtggccactccctggtgaatgtcccataggtgtgattttcagatggtgtcttctctttcgtatcagccatattatagggtcaccttcagtgggggcatctcaaggcacaggccctggcagtactggagagtcgggcctggaggccacgccttagctctgcagcagaaggtctcacttgagacgccagttacacgactctgatactcacccactcctgcctcctttccccactccagacctagggggcacttcagggggcaggctctcctgctgatctggtggctcgcctcctcccagtcctgtcctgccccattagagctgcagcccctcctcccagttgaggccaggtcccgtctgcactttggaacctcacacgatctgatgtcgtttgtctcctgtcccttttgctcgcccctccactggcttttgaccacgtctgtcccaccctgcatctatccacaccaccccgctctacctgccccttttctttcacagccggaatctgggagtggcagcctcattgtctgcacctcccctgcacctctcagccccctctctggctcctgccccggttcctctgaaacagctctttgaggtcacgactgacttccttgacactgtgcccaatacacgaggtctccttgtagttggcctcctgctagcatgggtgtagatgggcaggcctccctttctaagccccttcttttcttggtacttagcagagcagagtcctggggcttcatcctgcccccttgcccatgaccttccttgcagactcatccatgcctgcagcttcacttggcacctgcagatggttcattcccaaatctgtttttctaaccgggactcccgagtccagccgcctactgagcatccaggctcctgccactaaacttgcctggaatccccaacccaagctcagtcctcttccaggcaccctttctcagtgaggggcaggtctgtccatcgagctctgcaaccattgtctagcgtcctcatcttctctcagactccagtccacctttccgtcctgttgatggacccctaaatccccatctgttgctgtctctccatttccgttgtcaccctgtccgtaccatcatcaccactcatgtgctgggatggctacagtagcctctcagctgctctcccttcttcctctctgctgcctgcccctctgccagagttcatttctaatgaaggagtggttgggccacttccctgatggataccctggagtgacagtccttatggcctgtcacccgtggccccagggtcctcacatctggccagcgcttcctccccaccctcgacttgtctcagctgctggcccatgccctaggcctcggcagtccagacatcctatagatcttctaaggtgtcattgtctctgcaccctagggcctttgcacctgctcccgcctcagcctgggaggctttctcctccttttgccttatggcttgttgattccttctcctcctccagacctcagcttaaacagcagccacccccaaattcctcaccagagcagcctccctgtcccttccttcccagggccatagcctcccttttgagcattcaccatggcccatcctgatgcatttgttctgtggctgtgggactgatgtcagcctcactgtgtagcctgtgagctccatgtttctgtcttaacaccggtctttatacagtgggttcagaaatgctgagcacctgaactcatgacagtgaacttgggcaaagccacgtgacccacttagatggtccttatttgtaaaattgggaccctgagattgcttcatggcgtggttgaggactgggtggaactgtaccattgttgcacagaggtctggtgtgttgggcatgagggctgcactccaagactccgtgcctttgcagagagcagcgggccttgtggatgcacccccacactcccacatacacctgtgctccagctccacccagccacctcctcccagacccccaggatatacagggacaggtcttggagctaatgagaccccctggggccacactggcaccttagaagcctctgtccaccacccatgttcaggataattttcttcaaaggtggcaggagtggagaccctcaggcttgaagctgtgggactcccctccccttccctctccagagggcctagggttttcctaagcggtgtttcaaacagaggcttcctctggcaggggagaacctggagcgccttattcttctccagactgtgcagatacactgtgcatatgcctatgtgagtaagatatacggtgtgaaaaggataaatcactctctggggagacaagatctttaaacctgtatcttgattatcttgtcattttgtctccctctggtggtctcagcttagggtcagtgcaagacttgagcaaaataacagcaatttctacccaaacatgtagggctagctgctttcattttctaacgaagctgttagatttgggttctgcgtttcctgcggaagttgagagctgtgcccatgaatctgatatactccccacaccatgccgcccccactggactcttctctgggtctgggttctcctcccgtggtgcgtgtgagtgggaggcaggatgctggggccaccttggactcgattgtttctcgctgaacaaaagagcaaggcaggcatggaaggcccccaggcagaggtgggtggtggctggagttgcagcaaggcccttgagtgcttcactggcctcatcccggaagcaggcatccgtgggtgccagtggtgaccccctgcctgggatggggcatccttcacacacagcagtctgtgcccagatgggccccagagctactgacgctcacttcagggggagacgaggccagtctttcccaaatctactcaaggacatgggtcaacatggaaatgtgaacctcagaagggtctggtgcactgaccagggccaccctgggggctggcgagggagaagccaaggggcagtgcctagaaaggtaggagtcagattccaaagggagggctggcctcccagcctccccagggcctggggctgacagggtgccaggcagcccctgccacagaggggacataaggacactcgcccaaggccctgctcacctgctggggctgtgaggctggggtacctggggcgcctggaagaaccagagctttcctgcagaacaaagtgacgccatctagtggtcaatgagagccactgcattgggccccactgggtgactggggcttcactggggggtgcctgttgagccatgctcactggggacggcaaggtggtgtgaggtagtagaaacaggcctacctcaggcgctgggagccttcccagccccacagccagatgccataaaaggcagcacagggcatgtctggcgagcctgtggcagccagggctgtcatacacgctctccaagccccccagctaggcagatgtgcacacttcactctgaagaagcgccagggtatggtgggggtactgcattgggatagatgggtcctgttccctctgtggggctgcctctgattctcctggtgacaggagaatcccggtgtaccctctgagagacaggtggacaggggttcctcccctggtgccacccctgaatcccgcagtcccccacattggtgcctgcagccctgcccagctgggagaaggtttatcggctccagggcaaggggtgaatggaggatatttaaaagccgtgggaggaccccattgataggactcagttagatgcacaggggagggatgggggtccctgtggggagagacggctgggagcacaggtgatcctctgaccccaggggcacgcagacccactactgcccaggaaagcaggaaggagggccaagtgggctgagcaccaacgcgaagctccccacttggtctgtctgagcaggtgagggaggggcagccaggagtttgaggcagtggaggggtctggaataactcttgcatggaggaagagtctgagtttcccagagagatagatgagagttgtgaggttgtttggggggcatttggggtcaagaatttataatacatttatcatggcactcatttgccctcttgggcagctttttccagcctcaggtccagagaaaacaggttggagatttgctgaactcctgtgggcagatacacaggactggggtcagggaactgaggatactgggcggatgttattgaagtggtggatggcagcgcccaagctgggccagttgatgattttagcaacagaatgggttagaggtgagaccagggatcagctggctgagggagggaagaggtcaggaggttgctggcgcgagggctggggaagtgcaggatggctgggcccgtgatgctggagggactcagggaggggccagctggagcaggaggggagccaggaagccagggccaaaatccccagtggaaggggctctggccaggaggtgggcagtcgggagggataaagcaggtgacatggccaacatgggtctgagaggacagccaagccacggtctaggatagctcagaggtcggctgactgcagccccaatcgcaaatcctcctggccccctgattttgcatataaagtttccttggcacacagccacacctcctgttttacatactgtctacggctacctttacgcctcaggtacaacggtgaatagttgcaacagagaccacaaagcctaaaacacgtaccatctccccctttacaggaaaggtttgcccacccctagctggagccttattgtctggcataggagccactcaagattggtttgtgggcaacatggacaggacttgggggttggttggatatgactctaacatgtggctctttatatttcaattaattaaaattacatacaagaaatgggtccagtccctcagctgcaggagcctcagtgccagtgctcaaagccacatgtgggtagcggatcctgtattggacactgcagagatagaaccttccattgtggctggcaggaagtttgttgggtcacgatggtctaggggcagcagatggaacaagcatgatgttgccaagcctgggcctgcggtgtgatgggtgtgaggagctacacgggtgtcctgagaggctacagacaggcaggagcccctcaggacagatgcacaaggacaggccaaggagaagcccagggcacagtttcaggtcaccagcatgagttccggggctgtggggaaggcatggaaagtgctgttgtgtttgggatgtgacgccttctggatttgcagcctgtgattgtcatcttgagtgacagtcaactggaatgctggcattgtcctcctgacactgtttgtgcagagttttctggcccaagtgttgatttcgcgcagttacttgcagcacggggtagtgagggaagcagaccggccgcccgtggctggctgcagatggcaatggttgggcccttctagtttgccccgcatcctggctgccgtgttccttgtgctatggccaggcatgcaagttctttgttcaggggacttctcctctaggaagactctgactctgtgccctccttcagttccagggccctgcgaaccagaagacctcatcgacgggatcatctttgctgccaattacctggggtccacccagctgctatcagaacggaacccttccaaaaacatcagaatgatgcaagcgcaggaggccgtcagccgggtcaaggtagaggtgcttcgagggcccctcgcggatgcccgcacactttggggggcactagcaggagggaatatggcggggcgtaggccctcttccagctcggactgcacagccctcagcacagggggcaggagcggcccaggtgccaacgaggctgagggaggcttgcgccttggctgggagaaagctggctgggcagaggcaaccagctccttaacaagaggcccacggaatcccagaaatacgacctttaaagatcatcgttccaaagcattctagtcatcaaacaatcccaaatcccagttcaacagtatgtgtatttttagtgccattcagagtgcttcaagaaagggtgaaaaataaatcacgttttatttaaattcaggacctcaagaaaaactttgacctgcttgtagctctaagtgctcattggattgtctggttttgaacatcgggtgaggccgggcaaggggaagatgaggccacgtcagcaaaattaaatggggtcggcggggaggggatgcagccatctgaggtctcagctctctgagcaagacaggatctgcagaggcccgccagcccaggggtgagaaatggcagcaacctcctccccagccctcaccatacacaacctcctctaacagaagcagagaagcaccatgaggccatccggggtgggcaggagaaagccaggtaacccagggcagtgctgagccctgctggccagtgcctctcagcagaggcccggccctcccatcccagacccttgccttgctccgctgcctggagctcagctccccttcctgccggctgatggcatctttcctgtcctccatagatggggtggttggcagtcatttctagcgctccagggacacctgtgtgggcttctcttggtcagtgtgtgtgcttgaagtgggcaatggctgtccacccgtccctgctgggctttgctaggcaccagacctgagagtgggggcatcaaccaccaaagtgacataacctcacgcaccttccttctctctgtgccaacttgtttttcttttctcttccatgctgtcagaggatgcaaaaggctgctaagatcaagaaaaaagcggtgtgtagggccttgaggccctgggacagtgttgtttgcttgtgtttccgtggcttgtcctgggcagtgggggctggggggttcccctggggatctaaataatgttgcaaagcagcttttcctcttcccttggtaggtgaatcttagatgtttgtaaatgaaactacagacacttcatttttttaaccacccatttatggaaggatttattaattcttctttcttagcatctcctgtgtactgtatggataatgctgtgatgttcctgttttacgtggacattttaaattgatatgacatttagttgatatgacaacgtggtgggtgtagggtctgggcctcctgtgcagtattactgaattgttctgatagttaaagattccttaagcttaatttactaagtcaggagggtgagtagctcagtttgcccgtgtggtgctttctttattggaaatgagtttttgggctgggtgctgtggctcacacatgtaatcccagcactttgggagacagaggcaggaggatcatttgagcctaggagtttgagattggcctgggcaacacaatgagaaccctgtctccacaactttttttttttttttaattagctggtcatgatggcacatgcctgaagtcccagctgcctgggaggctgaagtgggaggagcacttgagcctgggagtttgaggctgcagtgatctgtgtttgcaccactgcactccagcctgggcgacagagtgagaccctatctcttaaagaaaaaaaaaagaaacaaaaaaagaaaataagtgttgaaacactggcagacttttaaaaatgggttgacactgaggccgggcgccgtggctcacgcctgtaatcccagcactttgggaggccgaggcgggcggatcacctgaggtcgggagttcgagattagcctgaccaacatggagaaaccccgtctctactaaaaatacaaaaaattagccaggcatggtggtacatgcctgtaattccagatactcgggaggctgaggcaggagaatcacttgaactcgggaggcaagaggtcgcagtgagccgagatcatgccattgcactccagcctgggcaacacgagcgaaactccatctcaaaagaaaaaaaaaaaggattgacatcgagtcatttgtttgtcacctggtcatttagtaaatgctagagcttttccaatcctcctcatacagaaaatatcaaaatagttggtgtcacaaggcctggggcaaaccccggggtccttggcactggcttattgcccactgttttcttctgtttaaacagcaggagatttagttccccctccctgctttgaagtaatgccattttctggcgctttggccagaagacccatgtggggactccctcttctggagtgagactttggtccacctaggatgtctgccttttgcccagcagcgtctcctttgattctgctcaggagcaggagaggaaggatcatgctcatgctcctcttcccgggctgatttcctccaggcaaggcagaatgtgccacacattgcagacttgcagttggggtgtgcttttctcaaaagagaggggccctcgcttgcagcctcctagtccagctggagcagggagtccctacggactgcagctggcttctgggacctgcaggtccagcaatcctacagagtcgctgccgcctttagaggggttggtacaggcagacccagctcaaaaaggcctctgcggccagtcaggtggccgcctgattacatttaattacggtttgttcttcctttttggaaagtgggatgctcagtgtcattgctgaaggtccctttcctggcccggccacagccatggggatgactgcaggtcatgccccccatccacagacatgccgaggcccaccctgtggcctgttctctggtgtctgtaggatccgtactgtcgacaccctcccttcttctgccaaggaggatgatgggtgtcctctccctgccctgttactgatgggttttccactggaggctgggtggcttcaggctgcccctcttctcccatccagggatcccagcctcaggtttcctccacaattgtcactaatgccaaggtccacctgcaacttttctcacttctggcttgacctactttttagcaagaggattttgagccacaacccatgaatataacctttaaatgcatgctgatgctgaatataacccaattttaaaaaacagaaaaagttcctccgcggctgcggattgtcagctgcactgctttcaactcctttctctttctaatgagttaaaagcaaagaaagcccaaaagaccctttcccttgaaaattgagctaaaatacacatttattattacaataccgggcctctctaaaactcaaaattcttgaggaattgtcagcagggagatttcttatttcagattttctagtgaataattaaatcatagtttttgctgtttcgaaatggaaaatagaccaccctgggctccccagtgaccacggagaattattcacctcggtgggcaaaccaatagaacttgaaattcattgccaccgtgcagtggtaattaggattcttacaaatgtaaaaaccaattaaaggctatcctagtttggggcagactctgaagagttcactcagctcagaagagcccatgaaactcgtctcacaaccatatgccagacatactacagtggctacaggtgacgaattaggccatttgtgtggcacctctcttggcttctctctgtcgctgtgaggacagcacttaggccagccccagggctcagtcccccaaggacgctgtgggatggacatggtggtgactgattaaatcagaaggaaaggctgacattttcattcagcttctctgacaatgtcttccccatttcttaaggatacttagaatcccaaatccaggaaacgtaacctgagtctataaattccacaggggtcagccagagggccttgcttgccactggcaggaggggctgtggcgacagacccaggcgtcccgccccatctcggtcaagctcccgggggctggccctcctccctcccaggtgcctcttacagactgcctcgagaactcacacttagctagatgatgcggccggtggcgtgcaggtagatttctgatggccagtagcatttccttctacgtggactctgggtaattgttaaaattgccgagccttccttcgagttattactttttacattgacggataaaattgtatgtatttgttatgtacaacataatattttggagcatatacacattgtgaaatgactatatctagctaattaacgtgcattacatcacctagttttaatttttgtaatgagaacacttcattcactatcttagcaatttttaagaatatgaaatattattaacggtagtcaccatgatgcacaatagatctcttgaactcatttctcctgtctagcaggagctttgtgtccgtggaccaatacttcccccttcactcctttgccccagcccctgataaccaccattcagctctctacttctgtgagatcgacatttgtagcttccacctgagtgagatggtgcagtatttatctttctgtgcctggctgatttcacttcacagcatgtcctctagggtcatccatgtgttggaaatgacatggctttttctttgtgaaggctgagtaggcctccagtgtgtctgcgcgccacatttctttatccattcatcgtgaatggacttcgggttgatcccatgtcttggctgttgtggatagtgctgccgtgagcatgggagtgcaggtgtctcctagacacgctgatttcacttcctttggaaatatgcccagcagtgggattgctggatcacatggtggttgtagtttgaatttttggaggaaccgccattctattctccacagtggctgcactgattcacaccctcccacagtgtaccagggttcccttttctccaccccacgccagtgcttcttatcttttatctttttgacgagagccattctgacagatatgaaatgatatattgttgtggttttaatttggatttatctggtgattagggatgttgagcattttgtcataatgctatttgcatgtcctctattccgagttggtttttggactttaacaatatccactgtccttcttagaattctgagggggatgcccagacgctgacggaagtggacctcttcatttccacccagaggatcaaggttttaaatgcagacacgcaggtaagcgtttaagacagttgttcaaaatcaggtaaactcctaagttcgactccttcttgtcccatggtataggccctcgttctcagcagcttctctcctgtgctctctgcgcccatcaacccaaggcccatagcccgggctgcgggaggagcaaggagcgcacagcaggtagcagtcgtgctggcgtcaccccagggctctgcgggcgggaggtaggtgggaagacctgctgggctacctgggccctcccctgcttccccactcccgggtagcctgacctctggggacagaggaggcagcagcccccactatgtggctcacactgcagcccaccactcccaacccagtgccgtgccctgaccatcctccaggccctcacataccctgatacgggcacaggggcgcccttcctcatcccatgtctgtcctgtgtccaggcttgcaccttgtcccactgatctttgtgtcctgcacccccctaccctggaaccagccccctcctggagcctggcacttggtgaaaactcagggagacaggtgccagggctcaggcactgggcttgcgacgcttcacagactttgacttcattttctgatcttttgtgggcaaaccatctggactagatccccccaccaaccctccgagccccatgcctcatcacccacctgtgctgggtgtccccaagaccaccacaggctgggtggtttggaggactgacaggactcagtgagctcacagctgagatttatttcagcagatggctccagagcagaatcagcaaagcggatgcaggcttccagagccctccccgcagtcacacaggacacactgaactccctggcaaggggctgtgacaacagagaagttgtgtctaccagggaagctcatagacactcagcccaaggtgtttactgggagttggtcataggcaccctctgcctggcagctaccaaaattccagactcccagaggcaaaagaggtgtccagcctagaccacgttgtttgcacaaacggtttaggcaaaaggaaccatggttgtcagttcgggtgctgggtaccctcctgagatccacgttcccagatgccagagagggccagccttgcaggcgggcctttctgggtacagctgctaggcctgccccagtacctcttcttgccagtgtacatggagggtgccacacctggggtgggaggatgggcttggggattgaagctgagccccatcctcatgagctgtatagccttaaacaagttcctgaacatctctgaacctcctaatacccacagccccagctgaaagagtaactcttccgctggatcctgtgaaggagagatgagaaatctcctaggctggcccagttcagggttcactccactggccccttctcccttcctttcctttcccttctggatctttggattctggacagggcatgcaaattaaagctgttggggcagaggagctggagaggagggaacaggtgagagactgggaaggccaaagtagccattcagagcaggagagcagatgcggccatgttggtaggcagcctctgtgaggaggaggagggatctgccattgataggagctggggaaggaacatgtttctgacacctggggattgattcaggcatttatgacagtgacagaaatcaggagatgctgaagagccactccaactgtttcctttcagtgtccctccctggaaggtgactcttgtggttatgaaacagcctcatggctttggccagaaaaaaagtcagcagctgagacaaaggtgaagcagcatgcactgcaaagtggattctgtgaggaagaaatgaggtccagaggttgcagaaacactcgagtttcttttgtgaacagaggacaaaagcataaaagaccagttgattagtttttttgagctttgtgtgcagtcttgttaggtaggggttgtgggcaagatgctggctggagattcctgtccaaggacaaaaaaccatcaagagtcatgggcctgccagaggccgagggaattgaagtcaggtgggctaccttggtgtcttttgacccaggcccaggctgtttgggctccctgggaagagctcattgaatgacaaacattggccttgatgctttcctcttctgcacagcaggaaggccaggccaggccactcttgggcccataggagagcacctcgttcagaagggacccttctccagagccactggtggcctctcatccgggaatgtatgggtttcactatatggcaagcccctgctccagcagagacagcccgagagctcacctgacatcacgcctccctgggttctgcacagtccattttggaagctgggactgagatgagggcagagtgactttgactgtaaatcattaccctaaaacgctctgttaattagggccgtggttctcaaccagtgtgatttttgtccctcaggggacatttagcaatggctggaaataattttcattctcacacttgggaagagggaggtgctactggcatctcctggggagaggcttggaatgctcctaacaccttgcagtgcacatgacagccctccacaataaagaatgatccggccccaaatgtcaggagaatcagggttgcgaaacccgaataattggagtgccttttttttttttttcctttctttttttttgagacggagttttgctcttgttgcccaggctggagtgcagtggcgcaatctcggctcgatgcaacctctgccttcacagttcaagcgattctcctgcctcagcctcctgagtatctgggattacaggcacctgccaccacgcccaactatttattttatatttttagtagagatggggtttcaccatgtttgccaggctggtcttgaactcctgacctcaggtgatctgcctgcctcggcctcccaaagtgctaggattacaggcttgagccaccatgcccagccctggagtacttttcaatggattgtcccagtagtgttccctgacgtggcactgtctccctcccgacaggaaaccatgatggaccacgccttgcgtaccatctcctacatcgccgacattgggaacattgtagtgctgatggccagacgccgcatgccccggtcagcctctcaggactgcatcgagaccacgcccggggcccaggaaggcaagaagcagtataagatgatctgccatgtgttcgagtcggaggatgtaagtaagcccttgccagggcactcccctcccaaagttcacagcccagggcggctccaggatccaggcgctgtggaaaccaccctcaggtggaaagcctccatgctgttactgatgtttccagtggatcagtgatcttttgcatactctttgggtttgcaaagatagtgaatacagttttattctacttcttgaaataggttcttcaggagctgtttataaattgagttgtggttaaatatatgagggagctatttgaagaaatccctttacaaaacattttctctactaaaaatgaagttaatctttgcataacttttgttattaaaatgcaaattttcgcatggccctggcatgctgtataaagaaagcacatctgcacatgaggcttagttctgcctttgcgtgtggtcttcagaggaagtaaaaagtgattctgaagtataagataccaaagactcaggaaaagatcacaagccctttggctccctccttggctggagaagagtgttgtttttagcctggagggggacagaggggctgaggaaggagcagcagggccaagaggggagctcagagaggaactgtccttcctggaggctgatcttactcacagaccagcagggggcgctgctggtgagccagttttgtggctgttgccagagtgaaattttaaaatatgatctatggctgggcacggtagttcatgcctgtaatcccaacacttttgggaggctgaggtgcgtggatcacctgaggtcaggagttcaaaaccagcctggccaacattgcgaaaccctagtctctactaaagatacaaaaaaattagccaagcttggtggtgcgtgcctgtaatcccagctacgtgggaggctgaggcaggagaattgcttgaacctgggaggcggagattgcagtgagctgagatcgtgccattgcactccagcctgggtgacaagagtgaaactccgtctcaaaaaaaaaaaaaaatctatccttcaggggcagttggccagggcgttctttttcacataaggacttgaggctgtctcagggacctgggcaatagggaagggtccccatattgtcatgatcctgacatacagcatggaaactgaagacagggttcaaacctttggctggcgcagtcatcttcttcctaagaacttgggtccacttgaagtgcttcggcgcaatggcagatttacaggagggagagagcatttcaacagcgcactcacacattccttccaccgctacacggagacccttcgaaacctggatgggtatttctgtgtgactgagggccgaggatgtgtgagagacctggcttggggatgggccacaggtactggcggaatgaggccaggagcaggcccggtggcgaagggtggcagtcagctggtgagagtttccaaggggcactgagagcccccaggtgcagccgatgcggagggttaaagccagggtatgccgtattgggtagatgaggccgcagggtggtcctgccagcaacagcagcctcctcttccccacctctccagcgcctgcaggctctgcccacagcccacttgcaggaggccgcttgagccctgaggtggggcctgggctgggctcctggactcacagcagtgaacgcccacaggcttggctgcgagttggggccggcagggcgaccccttctctgaagcgccagccgcagagagagccccctgaaccccacacctcccaggaggcagccggtacccggcgtggagtgacggggaggcggcggctggcggcacaccagcggcccagatgacaccggaaggaggcgcagccccgcggagccggctccccgggcttggagcttccgcgggggcggaggatgtcgtccaaggggaggaagaatggcggtggcccgagggagcccaagtggagtccgagggccgtgggtggtggagccgggcctccggggctccagggctctcaggccgtccttcccagccaggtggcctcgtcaggcggagacagaagcagaggcctgggggccgccctccgctcttcccaaaggcccgaccctctcctgcgcgggcgctgcccccggccctcctgccgagccccatcagctcgccaactccgcaggccagcccggcggcgccatctggcggtccccgggcgtcgcgcctccagctgggtctgtgcgcgcggcagagatgctgggcgtgggaaccggcaagtcctggaaacggcttagggcccgtcagggagggcagttccacgcctgctggagggcaggccgcctgctgcgcgcttctaatccggcccagcttgtctttcccaatgcatacattcatctgctgctcttacatcctgccacgtggagagtgggaagggaattgaggccaaagcccttgttttcacctgttttgggatcctgttgagtaggagtttgctgggggcgcccgtgcaggacccccttgagggcagttggggaggcacgtgaggagcaggacagcgcataaggagggctcacacagcccagagcctggcgggaggccccgctgtgggctgaggcgtcaccaaggccgccaagagccccgccgcgctcccagggctgcacagctgccagcctgcttggcgagctccgggagctcagtacagccctcacctcccactgtctcctgtctgcgcaccagcaggcggccggccaggccctgagtgctgtttcagtgtccaggcctttgccatgtcagagtcggtgatgtccactgaagcagctcagcggaagtagaaagaagtgacgtgcttcatggggcctgtgtggagtcccaggtctcatgtcttgcaggcctggcctggcacagccacacatccctagaagagcagccaggcacaccctctgcctccagtgggcactgggttctgttgctaccgataaatacatgcggggtagacaactagcagcacgatgctcccggaaaacacactgaaagtccattttcggcatcagatgagtggaaaggaaatacagatggggtcaggtgcagtggctcacacctgcaatgccaacagtttgggaggccaaggcaggaggatcacttatgtccaggagtttgagaccagcctgggcaatatggcaagacccctatctctacaagaaaactttttttaattagctggatgtggttgtgctcacctacattcccactccagtctgggcaacagagccagacctcatctcgaaagaaaaaaaaagcaacaaaaatatgacatgtagtaaataattcattgttgtcccagactttctttgaaacagctttgacctggagcatctgggccgtgccacagcttaggcagggacagtcaggagtagaccctttggggttcagggcaacactggggttcgctcacggtggagtgctggtgggagacagccttcatcagatgagggagggcccccagtttctttcttgttcttctaagcccgagcaagggctcccttgaaggcttatgggtgcatcctgcacccagccctgccgcagccccctgctgaggaggctgcggggagcctgtgccacgtgcctgtctccagctggcctgccctctgcacaggcccagctcatcgcccagtctatcggccaggccttcagcgtggcctaccaggagttcctgcgagccaatggcatcaaccccgaagacttgagccagaaggaatacagcgacatcatcaacacccaggagatgtacaacgacgacctcatccacttctcaaactcggagaactgcaaggaggtaagccacacccaccagcctcagggaggccacatttgccagcttctgctccctgagctcctgcagagcgagccttcccggggtcctcacgcacacccttgccttcctatcagactccagtggggcccggaatgtgcacctcgctcctgccttccagctgagcacttgggtgtgaaatgaggtgtttgtaacaaagaagctgattacagtcagctttaatgacctcgaaaatgcgccttttaatgctgctattatcatcaaccagcactcagcacccaggagatatttctgaaaagcatgtggcatctctaaagggagcctgggggctctggcagaggaggctggaagccaccagtagcagaggccttagctggtcccagtggcttcccccaggggactttggaaagttcttatgggcagaggagcaaattccctggggatggcccatacctggactgtttgttaaatggctgaatgattgtgtctgctgtggatgagtggatggtctctgctgcttgttgaatgggtgaatgcatgatcctggtttcttgctgaagacattccaggcagtttctgagacagtgacctttgagaggaaataaaagtagaaggacttttccaacaagagtgaaggccgggggcaggatatgggtatgggagcctgagaacattcctctggcctctgtgggtgtggaaggagcaggaaccaggacactggagccctgcttggggtgggaaggtcagtgttgggcacgggtggggttggggtcaatgccaggcacgggtggggatagggggtctgtgcttccaggttcccaggattgctgggtggaccccaggaaggtgtgggagccagactggggtgaggctgggggtgggtgggcagggctcccagcccaagacctctcctggctgagatgagccagccttggatcccagggcagggcgggatgtgccaggacagggtcagcctcatcctcctgtgggtccttggcagaggcctcggtccttgccgccagcccctctcacactgctgatccctttgcagctgcagctggagaagcacaagggcgagatcctgggcgtggtggtggtggagtcgggctggggctccatcctgcccacggtgatcctggccaacatgatgaatggcggcccggctgcccgctcggggaagctgagcatcggggaccagatcatgtccatcaatggcaccagcctggtggggctgcccctcgccacctgccaaggcatcatcaaggtaggcaccctgggatcctccgcccaggggtcacctcaaccctgcctcacttcatccccactttgctgcaatccccacttcactgcaatccccacttcacccatggggaaactgaggcccagggagacccacccggtgactggtcgatgatggtatcagaatttgaactcaagaccattccccatgtctgaatcagaggtggacccgggctggcctggggtgggaagggaggggttgtctgagccctgtaccgagccatgtggccctgggcaagggcccaagaaccagtgagtatagggtgaccagcttatcctgctttgcctgggactttgccaggttagcactgaaagtccggcttctgggaaaccccctcagtgctggtgggctggggaggtggggcaccctgcatgggttgggttctgggacgcaggttcccttaagtaaggaggccaccctgaccgtcagactcgtgagcttgcagctttgggaggtgctgcctgtcgctgtgaggggtcaggcagaagggtcaccggcagctagggtgggggccttcacactggccgcctgcgaaggaatgggttctgcctgctgctggcggctcttgtgacccagctgtggcctggcccccagccctctgtggcatgttcctccccaccctgctgtggtcttggtgctggaggaagcgccttcctcctctttgttcggcatgagagatgaagggcattccccaggccagagcatcccatagactggctctcggagctggcccggcagagcgtctgcccgatgggcagccacacagagagacatgggagaggcctccaccagtggcaccagagggctcagcagttgaggccccccctcccagggctgcagctcccaggtggaggcttgggttcctccctgtgcctcctcacccccaccggaccccggcggcctggcgcacccgctgacaattgcgtcctcactcacagagatttgctgtgtggtcactccctgccctgcaggaggtccgtccttggagggcattgggttttgaggaaggtgtctccacatccttccgtaggaagctgtcccgaattcggcatgatgatggccccctcgacaccctgagggtgacctggtgccaggtgcgttggttctgcccagtggcactcagaacctgggctcgctcctgcagtggctaatcttccccagggcagaggcaccctgcgcatggtgggacagagggcgcagtgctgccctggaaacctggtagctctggtaagggccagggcgaggcttgtccccgctgcacagaggggctaccgaggctgagaggggactgcctgcctctcccattgtgtgttctcactgcccccggcctccaccaccctgccagcctcgctcatcctgggtcaggcttgatgtctaaggcccagcctgtgactcctgtccccgtgctctgcagggcctgaagaaccagacacaggtgaagctcaacattgtcagctgtcccccggtcaccacggtccttatcaagcggccagacctcaagtaccagctgggcttcagcgtgcagaatggaattgtgagttccccctcctgctctgggccaccaccaccactgcagggcccagggagggggagcagctcccgtccaatggggcaggctatgtctggcagcctggtaggacctggcctgtggttgcagctgcccacagccaggccacctggggcaggaactttccatggctctctgggaggtcctggctagaaggggagggccagggcatggccgtggattgggcccctccagcctttcccaggctcccttgtccccatggtggttgtcccctgctttggagggagggcagcagacttcaccagccactgtagcttggacacaaccaattgtggcatcacttactgtgctcaacaaacagacgttcactcattcattcattcatgtactcatcattcgcttgttcactcagccattcagcagacatttgtgaagtacctgctctgtgttaggctttgtaccaggcaatgggaaggcaggagtgctgcctggaggaggtgatgctgggcttgagtgagtgtggttctggccaaaaacctgtaccagttccccaggccagagttctttagcccagagtttccaccctctcactgacctgcatttgactggcctgaattcttttttcctttgtttttcctcctgcaaaagacccagagggcagagatgtggccactaagtggagtaaagaagaaaagggctggcaatacccaaattgtttaaaccagccctgagtatgaaggagcccaggaggagagacactgcgggctggagtgggagttttgtggaggtgatggggagggtgtgtgcccacccacagtcaggaaagacagtgggagaacattctagaaggactaccaaatcttctccattgttttctggtgaagcagcatggagggttacacccaccgtcagggtggagtcccagggcttgggtttagggtccatctctgaccctgctgtgtcagagcaaatttgctgctataaaaaagagtctgcaaatctccatatactgagagcttattgcttattcatgctgcagtttaatttgcagtgggggcggtgggggtgagcttcactccacaaagccactcaggggcccaggctctgccctcagctgggctttggcagcccccactgggtgctctgtgtctcgctggcactgcaggaagagaggcagctcagaagaccttgtgaaggttttcagggccagggcagaagtggcccttgtcatttctgcccacagcccactggccagatagctcagccacggacccatggggaggctgggaagtgggggccagctggtgcccagaacgaagagggacaggggcatcgccagcgtcagccataccttccctgctgtgtgaccctcaacaagtcactgaacgctcactggattcccctcaaaaggtgcttgtgaagatcagctgagaaaatccataaagtaccccaagctatccaaggtgggcccgctggtcctcgtctctgccaaggaggaggccccgtggcccctggacctggcacaggtgccaggacgagttgtctgcaccccacttgggacttcaggacagtgcgcctgccgcaggagctcgccagctggtggtctggcctggtccggctctgcctgactgctctgcacacatgtgacctgggcacaagcagttgccccagctaatttgggggctctgcagaaaatcagctggagccctgtctgcagctgctgtgcgcactttgtggatgggcatggctgggccccagggaggagggctgggacatccttctgggctactgcacccccgaccatcaccaggccctgcctgtgtgcctcccaccccagcactggggacagtggaggaagctggggactgacagccctgcagccctcatgaggagccgtgctgtgcagagcctggggtgctgtatggtgtcccctgggctgcccctgcctggctaaacctggtgaccacactgcctttgcctcctgagtggcactggggagctgcttgtcctgttcctgcacccccttgcccagcctaggaggcaggtgggcctgggttggtggccagtgctgctcactgacagccctgtcgctgtgagccctgcaggagaggctggctttccccaccatggggtggcctgggggctacctactcgtagggcctgtgaatatagccctgcccgggatgagtttgatgccccctcagtctgctggtcttccccaaactataaccccatgaggagcacaggaactggagaagctggggcacacagaggtttagtgacttgccccaggtcacacagccatgtggagcactggtggggagagggggagaagagatgaggaagggaaggactccggtttgtgttttgtgggggctaacatgaatgggaaaggaggggacagcctggagcagcccagccaagcccaggtgcagggttctgtgcctttcttcccagagagctggagagtgcaatgggcaggtgtgaagtcaaggcggagggcagcagacggggaccagggctcgctccagctgccttctggggcaggtgcagaggggtctggagtagctcccaaagatggggcaaggtgggtccgagtggccaggaagctgagggtggtggtgcggaagggggtttctcagaagatcagggggtgcagggttgagggcagcagcagacttgcggggcctgcagtgaggaaggagtcatgtgcaattctgaagacaacatctccggggtggcaatacgaaagagagggtgccacccacggctcggtgtctctgccctgggtctagggtctgagttccggagtgatggagggggccaagcgtctgtgaaacttggggggtggtctgggtcacgactggggacgaggagggtctggaggtcccagccctgcttgtggatgcgctgttgttccaccctctggctctgcctccctgtctgtgaaatggggtcccacttccttgaggcctcagtgctcaggatgcaggggagatgctggcagccgaggagaggggcaaatgctggctgtcaggggctttctccaggatacaggacagctcaccctgagagtgccagggagggttagatgaagcaaatgaataggcatggttatgatccatctccccagtgatccagaaaatggcatgcaggcggccatatggatcagtcaccatctctgagtggctcggctgcctggcggtaaacaccgggcccttcaggcccccaggtgcggaccacaccctctgcacctgctccatgagtgcccgtggtcatggtgggggttgagggtaggggtctggctgtccccatttggccctctgtgcacctagacacagaggctgtcacagtggctgccacttgtgcccctgcaggccagggctcatccaccccagggccatgtccaggcatctgcctggctgaggtgcactggggctccactgcccagccgggacctccagggagcaatgagcctgggataacattcaggagacccgagggtgctggctactctggtccaagcccctcgtccctcacagcgtgctcaggataggacccgcagtcccaagggccctggcctctactttcaggagcctggaaccccgggctcctgctgtccccggccctgcagcagtggggcgcttcccttggtgtcacctctctgggcacccccatccccaccatgcccagtgaagctctcacctgtgtcctcccgtccttgccaggcccttcgcctgaagtcctagctccagctggcctggggcagccactcggcaccttgtatcccgggagctggtgggcagggactggggttcccctcagcctccatgtgcctggccacctggggagcatatgcaggcgctggaggatgcctggctaggagtctatcagctcctgtcccgacctgcagcggttctccctgatgaccacagaaacattccctgtggcaggtggcaatgcttagcacccagagcgagcagtcagatgagatatgggccagctgcagaaatctgggtgctggtgtgtaggagacggggaggccccctcacagttgtctgtgtctgcatgtgtgtgtacacgcatgtgtgtttgggacaggtgagtctgtgcttctcccatcccaggccactcgcctcctcccagggctcagcacagtctcctttctccaggataagagggccctggggtggcgaaggagctgccttgcggtatggaatctgcctctctccacccccttctcttctagtcctaattctccttggacatccatttttccggtttttgttttcatttaaaaaataactgtggtaaaatatatctgtaacttaaaatcgagcatcatagccattttgaagtgcagagttctgtggcagtcagtccatctgcatgtcaggcagccatggccactgcgctctcctgcacgtcttcctcctccccaacaggaactttgtccccactaagcaccaccgcccatttctccttcccagcccctggcggccccccacttctactttgtctctgtgattctgactaccccaggtacctcatatcagtggcatcacacagtgtttgttcgtgtgcctggcctgtttcatgcagcatagtgtccccgaggtctgtccgtgttgtagcacacttcagactctccctcctctccagggctgagtactgtttccctgcaggcctagagcacattctgtttctccgctagtccgtgctgtcaccctcggctgttgtgaacactgctgctgtgaacacgggtgtgcacggcgcctgttttccattctgtccagtctcgtggtcacaggcgctcccaggccctcctgtccatctgtttggcgtcacttttaggctggaatggaagcccccaccgctgcactccagcctgggtgacagaatgagaccctgtctccaacaaaaccagaaccagtatatttggcacaaaatgcccttacgtcacttggcgggggggggatgtaggaataaagtgactcttccctgtcgatgtagaccatttgggcatccggcaaacagagccttcccttgacagaacagatgccccacctttctggtggccaggggacaggctgcctctcctttcccgcccgcccatcagctaagtgcctgtcttccaggatggtaaccaggctgtgccgtaggaggccaggtggcagtggccttgggctgtgtcaccagtctctagcctgaccacaaagggagcggccctgggggaggtgcagctgggggacaggttccaccgtgggagtcagaaaacttggtggttccccacacaccatggcattaactctcttgttttaaagaaacatactgcatatcataaggatctctgtctgtgagtcagcgaattgcacgtgcacgtattcatcatgtggcgcttttccctctgcatgtcccatctttggggacgtggtggagcgcctgtcgggtgtggcgggaacacgtgtgctgacctggccatgtctgcttagatctgcagcctcatgagagggggcattgctgagcgagggggcgtccgtgtgggccaccgcatcatcgagatcaacgggcagagcgtggtggccacagcccacgagaagatagtccaagctctgtccaactcggtcggagaggtaaggagggactttgagtgtgcctctgcatgccggttcccacgtgctcccgcctgccctccatgagcctcccccgctccagaggacacagggcatctgaaggtcagccaggctgtgtctcccatcggggctgctgtgacaagggtgaatggagcggcaggtgatgcggagccatcccggtctggctctaactgagcaaccgggagggcacaggctgctgggggtgctccctggacactacttttgggactggacctgtatgtccagttcagaagctctgcagggcacacagctctggccaccctggcaggcttgcctctctgcccttgctggccatcccctcccacagccaggctgcttgccctgtcccacttcactggctgaaccccccacagtccagttctttctggcatcgcttccacggcagtgtgaggatggtgtgggggaggtgcaggttttcctccagagctcacaaggaggcaggatcattgggaggggggatggtgctggggaggtggcacatacaccgggggaggcctggccagtgcgcagcgggtgtgcgtgtgtgtgtgtgtgtagtgtgagcgagtgtgggtgtgtgcatgtggatgtgtgagagcatgggtgtgtgtgggatgtgatgtatgagtgtgggtaagtgtgggtaggtgtgggaaatgagtgtgtgcgtgcacgtgggtgtataggggtgcatgagtggatgggtgtgggtgtgtggctgtgtgaatgtacctgagtgtgcgtgtggaggagtgtgtgtgtgtgggtgagtgtatgcggatgtacgtgtgtgtgtgagagcatggggtgtgtaggagtgcgagtgtgggtgtgtgcaggggtgtgtggctgtgggtgtgtgtgagcatggggtgtcaagcatgagtgtgtatgtgtgcacggctgtggctgtgggtctgtgagtgggtgtgaggcatggggtgtgaggagagtgtgagtgggtgtgtctgtgtgtgtgtaggggtgtgtgaaggggtgttcagcacaaaggggctgcaggctctctgggaagcgtggtggccgcacgaggcgggaggctgagagctgaggagcccggcctacagaggggcccgctggggaccgggcagggaatttgggtctggggacagcagcagcaggccgggccgtctgtggtgctccccctggtggctctgtgaggctgagtgcgtggcgaccatccttgcagcctgtgggtgggcgggtgggtggaggggtctctagttcctgttcttcggatgaggtctccaggagccacatcgggacactggtattttgtgcactgcagggtcggctgggagctgggaggcctgttttccctggactggtgggggcaggggtctggctcaggaggaggaggggccaggcggacaccagcctccctttgatggcttcaaagaaaggaaaagccagtgttcccaagtagatgctttgaagcggccgcccccacggccagcagccccacacctgtgaggaaatccacccgtggaggagcgggcgggagaacggggaagaggcaggaggcggccggggcgttggaatcctttcagccctgccgaggttatggtgcctgtttccagcagctctgagcccacgcggaacatgagtcgctgataaacaaggcttgcagttgcgaggggcctcggggtgggtttctggttgaggaacgccggggaatggctgatggaggaagcccctgccgggagcaggagcagcggaaacctacatcggccacacagatcccggcgggggagggagggcaacgctcagaagcagagctgcgcgatgtgcctttctgggctgctcagcccagggcccgagacctgcttgcctgaggaggggcagatgcacggcggctgcaccccgtggggaggccagcatgcctgcggcagctgaccctggcagtgcgagggccccccatccggaggccgcagcctagcacagtcccgggcaggacaggggagagcgtcgtgctcaggagaggagaagtgggcagtagagctccctttccgttcttgaagcagacgtttagagtctgctccttcccagtgtccgcaaagaaggattacaaggcgcgccacccacacggttggtctccctggggcggtctgaggccttgcttgtatacccagctcctttggagtcagggctcgaggccaggccccaaagggtcatttgctcaccgatccccaaaggctaagaacttgaggtgccctgggccccagcgagcctgttcccagcccccagcacactttcctggcccgtgtgtgttttgtaagaaggggtgtaggccgggcgcggtggctcaggcctgtaatcccagcactttgggaggccgaggcgggcgtatcacgaggtcgggagattgagaccatcctggctaacacggtgaaaccccgtctctgctaaaaaatacaaaaaaattcgctgggtgtggtggcgggcacctgtaatcccagctactgaggaggctgaggcaggagaatgacatgaacccggggggcagagcttgcagtgagccgagattgcaccactgcactccagcctgggcgacagagcaagactccgtctcaaaaaaaaaaaaaaaagaaggggtgcgtgtgtcttcccccattgagctcctcctcagtgaagcagagtgcatccctcgcagtttctgccgaggcctggccacccccagccagccccagtggatgggcaaactgttgtcaccactagaagtccaatttctcacccctcgggtgtcagctggactggaagcaaaactagcactcaactgtattgactcctctggagccaggggtggggacctggagtctcagtctgctgcatctggaaggcatcataagtgtccccaggcctgggcaggctggccttcctccttcactctaggagatgggcatttgaagcagaactctggggggtttgcctctgtcctttgctttcacctgattgtgggaggggaggtgggagggcagcggctcagcctcctgtttctgtccgcagatccacatgaagaccatgcccgccgccatgttcaggctcctcacgggtcaggagaccccgctgtacatctaggccaccccagcctggccacgcagccaggacaccgggcagggccgcccgggcccagaggagctgggagccgggccgcagacttgaccccgacgccacagcccagccacggacgctggctccccaaagggtgtgccctcaccacccacttgatttttttcattttgccaaaaaggggtatgtctttatcaaaggagagtcacagaacaaatgtttgtttgtaaagcgttccaagtattttgccacgttctggactgtcttctccctgcacaagccagggtgtgtctcggtagctgtgcgtggtgtggagtgtgtgtctttcctccctgaagctgtgcggagcgaactggcgcctccgagggacgcggctcccggggcagggcagccgtcacccctgcctcccgcccccttggctgggacgtctggggtcctgtggggcccccacaatggtcccaaacagctgcctctgccactgactgcagggacacgggcagcctggctcccaggacacgacttgtaatgaaagtttggggacatgtgattgattgattgattgtaaataaaggatgatggccacaacatgaaaactccatatttatttagatgctattattactgtttggacttttattttggcaggcttttttccagactctagggttttccaatgtgactaatgaccacacctgcctctcccgtcgtctcttctgggcaccctcccacccggctgcatacccgggcagggctcccacagagacaaggagggcacaggtgtctgccccctctttaaaatcgatctacacacatccacgcacatgcgaccccgaggaaacgaaacccactctagaaaacgcgaccttggccgcacctaaagcagccagccgtgagtgcagaccccttggccagcgtggcgcagtggccctgagcagtagtggcatgtgtgtagatcaagtcggatctagtccagctcggttcattagcgatccatgtaatctgacgtcatcttgtctcgaagtctctttttttggcccaggccttgaagaatacactgtgacttaagaagccttaccacgcagtaactaaagctttaggatgactgtattcgaggagtgccgtgtgttgcatgcagctacccgtaggaagacttcgcgcatatcactaataaacctgaagtcgtgatgaaaagccgtgtgtgtgactggtctgttacctcagcggcgggtgcccgcctgtcctttcattcacagcttggatgcggctctgcaaattcactatgcggtggcagccacagctgctctgtgctcctcctggatcctgaaccttggaagctgtcactaatgagttcggtgggtgggtgctctgggcaccaggtgtcagctgggcaacgccccgctgcaactggaggtgccagcaatgctaccaggtcacggggtcagcgccaggttcttgacccacttgccccagcagggagacacgtccgcagagcactcactaatggaatgagggagccagggagccttgggcttcttcagatttcaacgtaaatggcccctgggaaaggtgtgcatgcgtgtgcgtgtgtaaaagccggaccgcccatcccagcaccctgtctgcacctgtgggtcctttgcagcctgtctagagtgacaattctggcagctctgccagcacttacctttcttcatggccaccgttctggtgtcacctggtgtgggaaagccaggtagcaagcacgggctttgttcagaggcggtggcctggggtccagctgggttaggctgtgggtcttggatgggcaggagccctcctctctggcctgcccacagcagcgtgagctccttgctgtgggcactgaccaccttcacggcccaggattcttggggaactgcagagtaaggagaagacttactctcacctagccgcccagagggtgtgggccaagggcttgctccagcatgaccttggccatcaggggcatataaaagagacggcctttcaaggcgcacaccagctttgtgcctccctcttcccagaaagtatacatggtagaggcaaagaaagctgttccataggagactgtcacagagagctgcgtatatgccgaaatgtatatgcactcgctctgaatgaatatgcttaagaatgatgagttcatgtcctttgtagggacatggatgaaattggaaaccatcattctcagtaaactatcgcaagaacaaaaaaccaaacaccgcatattctcactcataggtgggaattgaacaatgagatcacatggacacaggaaggggaatatcacactctggggactgtggtggggtcgggggaggggggagggatagcattgggagatatacctaatgctagatgacacgttagtgggtgcagcgcaccagcatggcacatgtatacatatgtaactaacctgcacaatgtgcacatgtaccctaaaacttagagtataataaaaaaaaaattaaaaataaataaataaataaataaaataaaataaaataataaaataattcacaattctagcaaaaaaaaaaaaaaaaaaaaaaagaatgaaaagcaaatacaattctcgacgtggccaacaaacaagaatgccagggatggccacatccttggggaatgaagagaaatgtcgcctgagtcaaagctggagggaacgggattc

SEQ ID NO: 33 - DNA, 287452 bp, Homo sapiens
  source 1..287452: mol_type = genomic DNA
aataatctgcctttcccagagagtactagtaaggaatttacatcgaatcctacagcagcattaagcaaagattgtgtaagtgcaaagaattacaatgacctctgatacagtctggctctgtgtctccacccgaatcttatcttgaattgtaatctgaattgtaatccccatatgttgggggaaggatcttgtgggaagtgactgaatcatgggggcagttccccgtgctgttcttgtgattgtgagttctcacaagatctaatggttttgtgaggggcttttccccgcttcaccctgtgcttctcatccttctccttcctggcaccatgtgaaggacatgtttgcttacccttctgccatgactgtaagtttcctgaggcctccccagccatgtaagtcaattaaacctctttataactcacccagtctcaggtatttcttcctagcagtgtgagaacagattaatgaagcctctttcagaaaagagcatcaccaacgttaccaggacaaccagtcctcctttaagaattcaaatgttttaaactcaaggcaaatatatttatttttattttgtctcatacacacacagaaaaacaaataaaaatctagcctgagatttaaaactcactaaggaaaaaaaatcacagcaaaagcagtaggttaacatcaggatatttatattcaaggctctatggtatcaagttttttttctctttagagccaggcatggtggcatgcacctgtggtcctagctactcacgaggctgaggcaggaggtttgcttgagccccagtgcttgaggctgcagttagccgcgaatgcactgctgtactccaatctggaaaacagagcaagaccctgtctctaaaaaatttgagattttttaaagtccatatttttttgttatttaaacgtgatattattcaacattgatgaacttgggtcgtgagttctaaaagggattcaaaataaaatggcattttcacttttttaaaattaagatactttttcatgatcaaaaatatgttgtgtctccctcctgaccctccttttcaggtaggtagcaaacgttgcgaaatttagttggcatatgcttcagacaaccttttacttaaatcattatcctcactgctatctttttttttgaagttgtatactcctaaaatgttttaagcacttaatttttcttttatattattaattgttttcaacccactaataagtaccattttgctaattgggaaattaatacatattgtcaaagaaacagactaaactgtattttgaaaatcctgaagaataaaaatttgtaaaaggaaaaaaactaaagacgaaaacatatttacatctctgacatcttcctactttaaaaattacaaagaaaatagaaaatagaggtgacttttaataacaaaaaagtccatttctcaatattaataaaaaaaaagcaaaaatactcataaacacataggattaaaagtaatgattccaagagaagataatttagaaaaaggcatttaattacaaaattttcttttaaataaaaaagcaatggcacgaatcaccacaaaatcatttaagtgatcatatccacaggctgttcttgtaattatatgctaaaaatttatgactgttctcattaacagcattcccccccttcattagagacatcaagagcttctgagaatgtgtagtttttcctaaagtactactaaaagtatcatgaacaccgtttgtgcagcattcatttacatcaccttttatttactatattctaaactcataaaatatttaacatttctctacttcatttcttatttacagtacagaggctcatctcttgtcacaatatggtttgtgcattaaaatccctgggaatagtactttcaagaacattttaataaattgactccgattatttaaaataagaacacaaacaaaagctttttcacccagaagaataattcttccagtagacttattcaggacttaaaaaaaaaaatccctctttaagtaaaatacattcttcaaccattactggattatactatcatgcatatttataatgctaataatgacaacacgtaaagccagctatgacttttaaaattccatttagaagagtacagtagacagaaagtgctttggctttcactctcttgttatccataatccaattattatttcacatgggtatattttatttattcttagtatataagtatttaatggttcagtaataactggcagcttctgacagtcctattttcttggtcgctgatacggttctgtgaacataagtcagatgaactgaaaaaaaatgcaaatcacttcctgtgatacagcaggaaaaggtggaatgttattatttgagcaaatgattcaaagagatgaatactaacattctgtcgtgacaggaatactgtgaaattaggtatgttttaatgtgctgtcttcacaacttgccatacctggtatttgttatctttttggtcaaaaagcaaacctaactgggaaagggtagatgtgaggaggtaatagaggtgagagagcatatattacagtatatatgattttaggagaaaagaatgggaagagaagacatttccacatattaaaaaaaaaaactatgtcacatctggacacatttcacagagcatatgaaaactgcccacaaactaattaagcctctttactctcactccagaaattttttttctaataataacattaataataattaatataattctggcagcagcacaaatctatgactttttaaggcttaagagagtcatttttaaatacttgggtacaactgaataatatgagtcctgccatttcttttatttacactcttgactcagcaagaattatgacagaagtccacatggttatctgcagcttgttaagtcttctacaatggctttgactttataacccactcagcatttgggttaagctgatataaatccttcatgtaagtgtcatcatcaaggcagcgttcccctgttaaaatagatgttgtgtcagtttaatacagcaggtagattggtatgcaattttaaacttaagcttaattatttaactcttaagtcttggacttcaaaatacttattctactttgggaggccgaggtgggcagattggttgagatcaggagtttgaggccagcctgggcaacataatgaaaccccatctctacaaaaaatacaaaaattagctaggcatggtggcttgcacctgtagtcccagctactcagggggctgaggtgggaggatggcttgagctcaggaggtggaggttgcagtgagctgagattgcgccactgcacttcagcctgggtgacagaggcagacactgtctccaaaacaaaacaaataataataataaaaaaaaaacttctcattctttcctgtttctcaaaatattgtaagaattggccaacaattggaaaaataaatttggtagtctttctccaaatgaataggtttcaaattaatttaggaagctgaaaatactttgtatgataggcttttaaatagttccttaaaagcttaatcatcttattaggaggggcaatggttttgaatccacctaagaaactacacttaattcccaagatctaaaaggaaaataagaaatcaaatctattaatatttaaataacctttactaatagagttaacaattccaggtttctagtgtcatggcctatttaagaataaaccttcacattcctatatttaacttttaatatttactaacatttttaattcccacaaaaacaccctacaaaatttattgcaaaattatttttaattactattttgaacttaacatgatttcatttatttcttaataattttacccttaccatttccaagagtcaaaaaagaaaaaaagattattttaaatttttaaaaagagatggttaagactcactgataattacaaaagggtaaaatataaaacatggtcaaagttaattcattccattttttaaattactaatgtgaatttgagtgtgtgtgcatgtgtataaaatttagcaggaaatcaactatggcaaaagtaaatctgcttttactaaaaatatctaatactgtactataataaagtgttatcttagccttatataagctcaactacttcctttactatgtgacatgagtatattacaaagaagagagttttgaaaaacttgcatcattaaccattccaggagttattcttactgtatagggaacttgcctttgctgaaattgaacatagatgggcatttgtacaggcgctcaaacagagcctgaagagaaaggtcaaaccattaaagaaatccacaatattcagcaacttatctaaagcatggtatattttacttctaatttcctgttcttcctccaaagacataaataataaccactggcaatatcaaaacagcatataaaatgtaaagagaaaaaaaagtgcttaccaatatttcctccaatttcatacaaaaaaacttctcctttcttgagagtctgggcaaccccactatgagggacaaaacaaaccgattagttgtatcatcaaacagcttgcaagtaaatcactttaacgtgcttggggaattctggctggtatggaaaattcataacttagacacactgtaattatctacacgtttgtattttcccatctgttaaatgtacccaataggtaataaaagtatcacacctgtaaattaaaataaacaaatggaattatacatctgaaggcaaagtagtaaaccagtatctaaatttgtaaaattcaaaagaaaagttaatgtaacatttccgctgccaatcaaattattaatatgattatccactttgtatacaagccaaaatggtcctcataaaactattaaatgtttccactttagttttcacattactcttattcaataagtatttatcatgggtttgctgtgctgacaactccagtagtgtgcaagatgcatgtgaagaataagacatgcttctgactgggtgtgaaggctcatgcctgtaatcccagcactttgggaggccaaagcaggtagatcgcttgagcccagtctgggcaacatggcaaaaccccatttctacccaaaatacaaaaaatttagccgtgcatggtggtgagtgtctgtgatcctagctactcgggaggctgaggtgggaggactgcttgagcccaggagatggatgttgcagtgagctgagattgtgccactgcactccagcctgggtgacagaatgagatcctgtctccaaaaagaaaaaaaaaagaataagccattctcttctgtcagttgtgcaaatgagggcagcacagaccctcagagtggaagcaaattatgtcattatctttctgtaaaagaattacctgagaaacctgctaaaaattcagatggagagctctagaaactcagatttaactggtctaggataaagcccaagaaactgcttttcaaatgctctatagtggattctgaagcatggcaaggttagtggaccactaagataaggccctgaagacacactctctggaactgagaagagaaaatcaggtctgacttgtattcaagccattaggaagagcatggtacagcagcagcgctcctcaccacccatggaatggctcatctggttctcctcctttctctccctgccctgtgtccctggcacactggacagtcagggctctctgggccctcacgctatgttccacctgctgcactgcatctgatccactttgtttccaactacagtgtaggtttatcttttaaattaaataatttaatcattattatttttgtttttaatctagtacataacacaatcaactactataggtctaaagagagtccctatttctgtgaaaaccaaattgaatgtttcaggagacttgatttaaagaaaaacatctagttagatattgctgtcagactgattctcaagtacctgtgttctactttaaagaaacaggaactagatttcctggtatattcagatttttgcgtaatgctaatcaacaaattcatcgttaaaggcaacaatcctttaccaaagaatgaatgaacgtgcgatttattatacatatattgtatatcattcatatgtccattggcttcagttgacgaggtgggggagaaaaagaatggaaggatatagagtttctacctgccccagcacaggtggaatacaaatggaagaagcacaggaatgtggtggaagaaatatataaacatttactcagaatttcacttactatgcggcccagacagacagtgctatatgctgcatggtcattttcctagttaattacaataatagatgctattctggtccattcttacaaatgaggaacttgatacttaaagagatgataaaaactaactgaaggtgaaacagaaatagttagctttgaaatccagattacatccccaagcataaggaaaggggctgaggactgggggcggaagtgaggtaaatggagaagtttaccagacttccatctaggtggagaaggaataggaggaagagcgggatgaagataccctgctctgggggtagcaaatgcttatttaatacaaacaccacaagcagaaaatccaaatttgtcagacgatagttgtcacaagttggtgctttctataacaatatgactatgattgttttcatgctataccttaaatattaaagtcacagttgaatgtggggtacagcttcatagtctcatattattagcaagtagaggaacaaaagtacagactaaattgagcacttgggtcctgaaagtaaatgtaaattaactgtgtctggctggaaagagctgcttatatctgaagtctggccaggtcttcaggtacacgttctgggagagaatgagagcatggctggtgggaagaatggcaaaagttagtatctactaagtcaaggtagggagcagagaggatgtggattgactttgcagaaactgcaagacactatagggagcaaagacatctgagatcttccaagtgccctcaggacataatctccaaaaacacatctactctcagtctctgcactagtggttcccagatctatgatgctctgtagatcctccagccagtgtggagaatggttaagggactacctttggagggaaaccacagatttagaattccagctctaccacctatgaaaaatgtgtgaccttgtaaatctctgttttcttatcagtgaagcagacgtaataatagcacttacttcagagtgctgttctgagggaagtttacactggcttattgaagcctagatattaccaataagcctctctctcatttcatcaccatctgttagctgcacagattcatcctttctcccaatttataaaccctatgggaaggtactttaaaatatatgtttatacctccccttccaattatggtactagaagtatttaacatgtttctgttctgtttaaggccttgtgctttagcagaaagcttgattgaagcccccaaatgttagaatgaggagattaaattcaatgaaagaccaagacagagtattcgtaaactgagatgccaatgccctggatgtccctctgtttttaaacatttagtttatttcagtgactgaaaatgaggctggaggaggcatgaaaacatgacttcagctaaaagaaagaattcaaagggcaaaacctgaaaatacaatatacttgttaggatctctaaaatataagaagacactgcaaagtgttctggaaagggcatactctaatatagtgagagggatgctagcagctttcaaatgactctccctgccccatcaaccccaaaatatagatgaaggacctgttgtccttaatgaggatggtatgttctccccttgagacttcagcgctcaaaggcctggttttcctctttcaattctttatggtttgtttttaaatttgaccattttgaaatccattatatttcatagaaaaagttgtgtcttttctttattttaatgccactgcatcctaattagtaattttccttacagcctacaaacagtaattaacctccaatcaacatatcctggaaagaatactgagtggtctcgcttggcaagcccatcacaggcccagtgaaggaacactcagaaatcctgcttgaatcaggctcaatctgaacacaagccacatcaaatgaactaaactcattccaacagtctaatggttaagtctgctgttctcttctgctgggaagacaatatttttaagcatttcatactaccccacaattaaaacaaaaaaaaaaaaaaggaagaagaagcagcagcgaaggcgagagagagagagcaagtgacttatgccatggcataattaacacaaaacaggcctctacctttcttggctgagaaacctggcaagtacatcactggcttttagttcttcagttagctgtattgccatggaaactttcgaaagatggggagcttgcactcgaatcactccctgaggaacgtcagcctgcaaagcaataatgacactggaacaaagctggcagcagctggaacgtgtaactctacaatgcattatatagtaagtgtgcttaactactacgcattttacttcactacataaaaaccttaactactgtataatgtaatttgcaaaattacatcaaacctcaaatatcctcttaatggtgataggggaactttataatgcctgtgcagtaatgcttaattatttttaaagatgtaaagaatgacagcaataaccattactgccatattaagtgctgatttctgagtattatctactagagggtgcttcttcatgtagcaatttatgaaattgaatcagaaagaagttactctgtgtgctactgcagtatgtacatttgaaaaatcttcctggacattcacaaaatttcacaaaatttttttgtctctgaatgttttataaaaaagaaacatacttttctatttttattgtctgttccccatttggttaatgagctcatgctttttggctatacactttgaacttacgatgacccctttctaaatcttttgcccatggatgtgaaaaacattttatggattcgaggataccagtgaaagtttatgaggtttgtaataccaaaatgtcagctatagcgttagaaatattagtcttaattaattcctaaagggttttgctaaaataaatactattatttataaccattatgacttagaccttagaataaacagcacgcacaaatcatgttcaaaagataatgctttaaataatacaaataccctgttcaattgaaccaaaatttattaagcatctactgagtaccagatattgtactaggtttacttacccagtaataaataagaaataagtcctttactgcataactttgtgcccacaatatcatgtccttttttttttttttttaatgtacatggtcttgaattgtttttttaaaaaataaacatctcaggagtttgagactagcctggccaacatggcgaaaccctgtttgtactaaaaatacaaaaattagctgggtgtggtggtgccccacctgtaatcccagctactcgggaggctgaggtaggagaattgcttgaacccaggaggcagaggttgcagtgagctgagacgcactccagcctgggagacagagtgagactccatctcaaaaataaataaataaataaaaataaaataaaataaacattgagcagagatatacaacagatgccactaatttgatttctttcaaagttcaacacaaataatatacctttagaatcaggctctataaaaatgtaggtaccctaaaagatttaatattgcttctcagtaatatcagagatttagtgtgggaataacaaggaaaagaagcaacacgatataagactgtacagtgagtatgggattgtggaagaccacagactgcaaacaacagctagacctgcaaaggtatcacaaaggacctgaccatcaacctcagaaatcctgctgcagagtgggtggtgccccacctgcctccttcctctgaccagtcagtgaagggccacagaacacattactccaaacctgaacaaaaatggacaaagccttccagggccttacactcatgactttgctgggctaaccttggtcatagcatcctcctctaccttctgttgcaggacatattatgctcaattcaatctgtgaaggacaacctaattccaacctcccaattccaagcccccaattccaacctgtgcccacacccctcaattcctgcttcatctttccatccagcctgaatccttggcttggttttttgacttattgatacttcagtctatgaccttgacctcatccctaagatacaagtataatttccctttgtccttgattctgtgacaggctttattttcacttagaacactttggaacacatgctgcttcttgcaatggatggggcatttcatgtggtacaaagcagttattaaatcaatggtgtaacatacaactcagtgactccatgaacttctcccttgggtttgaactctaggttatttcccactatggccatttaagctgttcacatggcctcacctatttgttgcctcataggaggtggaaaataatcagtagcatgaacacctttaacattagactgaaaattgtaatagcaacatctgaagcactgagactgtgctcataaaaccctaatccaccttgtctactcagtaagcacaacaatattggtattttggattctgttagtttatcactattattatgactattgttttacttataaaacaatagtaaataaatattatttactattgtggagggacttgaacggcaggctagagtttacagatagccatgcactttatattgaggttaaaagttaggaaatcctggttaagtcatagtgtcaaatatccttatatacaggtttatcagggacagaaattgttcccagaatcacatcttacccagccctagaagaaggcagccaaatctgcactgacatttaaagtgaagatgactggattaagtttttatatacagaaagtccataataaatgagttgcaaaaccaaaatgattgagaaaataatatattaccataaagagttcagggatatggcaatcttagtcagctcctggccttttcccccactatttcttgtagaaccttctactgtttggataaaaaggcccagcagcactccaagctttcctatctttgtgtacgttctactccccctcccaaatatctctctgctaaccattttcaaggctcagctcaaatacctcaaactccatggaaccttccatgctccacagagtcaaaaggaatctcttcattccgctgactctccttcataagggtcctactatatgacctgtattctggttgtatgccacatatctgactcatatctgtagccacccatcaatgtttattgattaaatgaatcattcaaaattacttattttttgttcatttttactaacaatgataacataaacaaagtaaaatgtctctagaataaaagaaagtatgccaaggggtatttccttaatggcaaaaactcatcttaggaacaatgtctaaaagaaacaagttaaggtgcctctatccaccatatggtattccctccactaccaagaaaagacaggaagggaaagaaagcagagaaaaggaattaagtgtgttacaagagataattcagtcacttacttctgtagagagccaaagagaaaagccagagttactaacattagcatgtatctacttggggatgtagtctcttttcccctccaacacatctcatgaagagctgaatgtattagtctcttctcgtgctgctatgaagaaatacccaagactaggtaatttataaagaaaagaggtttaattgattcatagctcctcatggctagggaggcctcaggaaacttacaatcatggcagaaggcacctcttcacaggacagcaggagagagaaatgtcaagcaaagggggaaaagccccttataaaaccatcagatctcatgagaactcactcactatcacaagaacagcagcataagggttaccacccccatgattcaattacctcctaccaggtgcctcccacaacacatggggattatgggaactagaattcaagatgagatttgggtggggacacagccaaaccatatcattccatccccagccttccaaaatctcatgtcctcacatttcaaaacataatcatgcctttccaacagtcccccaaagtcttaactcattccagcatttacccaaaagtccaagtccaaggcctcatctgagacaaggcaagtctcttccacctatgagcctgcaaaatcaaaatcaagttagttacttcccagatacaatgggggtacaggcattgagcaaatgcacccattccaaatgggagaaacttgccaaaacaagggggctacaggccccacacaagtccgaaatccaacagggaagtcaccaaatcttttttttttttttgcaatggagtcttgctttttcacccaggctggagtgtagtggtgtgatctcagctcactacaacctctgcctcctgggttcaagcgattctcctgcctcatcctcccgagtagctgagattataggtgtgtgccaccatgcccagttaatttttgtattttaaatagagatggggtttcaccatgttggctgctggtcttgaacccctgacctcaagtgatccacccgccttggcctcccagagtgctgggataacaggcatgagccaccatgcccagcctaaccaaatattaaagttctaaaatgatcttctttgactccatgtctcacattcaggtcatgctgatacaagaggtaggctctaacagccttgggcagctctgcccctgtggctttgcagggtacagaccccctcccggctgctttcacaggctgatgttgagtgtctgcagcctttccaggcacatagcaacagctgtcagcagatctaccatcctggggtctgaaggacaatggccctcctcttatagctccactaggcagtgtcccagtggggactctgtgtgggggctccaaccccacatctcccttctgcactgccttagcagcagttctccatgagggttctgcccctgcagcaaattttgcctggacatccaggcatttctatacatcctctaaaatctaggcggaggttcccaaacctcaattcttgacttctgtgtacctacagactaaacaccacatgtaaacttgccaggcttggggtttgcaccctctgaagtaatggcccgagctgtaccttggccccttttagccatggctggagctgaagcagctgggattcagggcaccatgtcctgaggctgtgtagagcaggggagccctgggcctggcacagcaaaccagttctccctcctagccctccctctgtgatgggaagggctgccttgaaggtctctgacatgccttgtagacatttttcccattgtcttggtgattaacatttagctccttgttacttctgcaaatttctgcagtgggattgaacttcttcccagaaaatgggtttttcttttctatcacattgtcaggctgcaaattttccaaacttttatgttctgcttccccttcaatgctttgccgcttagaaatttcttccaccagataccctaaatcatctctctcaagttcaaagttccacagatctctagggcagagtcaaattgccaccagtttctttgctaaagtatagcaagaatcacccttattccagttgccaacaagttcctcatctccatctgtgaccacctcagcatggacttttttgtccacaacactatcagcattttggtcaaagccattcaatgagtctctaggaagttccaaactttcccacgtcttcctgtcttctgagtcctccaagtctctagttccaaactctttcacattttcttatcttcttctgagccctccaaacggttccaacctctgcctgttacccagttccaaaatcacttccacattttcaggtatctttatagcagcaccccactctatcggtaccaatatctgtattagtcgtggttcttgaaaaggacagaactcatagcatagatgagtttattaaggagtattgactcacacgatcacaaggtgaagtcccacaataggccatctgcaagctgaggagcaaggaagccagttcgagtcccaaaacctcaaaagtggggaagctgacagtgcagccttcagtctgtggctgaaggtcagacagcccctggtaaaccattggtgtaagtccaagggtccaaacattgaagaacttggagtccaatgttccagagcaggaagcatccagccaggaaaaagatgaaggccagaggactcagcaagtctgttctttccactttcttctgcctgcttttattctagccatgctggcagctgattagatggtgcccaccaagcctctcccagtccattgacccaaatattaatcttctttggcaacaccctcacagacacacccaggaacaatattttgcatcctttaatccaatcaagttgaccctcaatattgagtgacaacttaatgctttctaaatgagctcaggtaccatagctttggggagtatgaccatgccatgcttccttatgaaatgaggtgttgagttcagggtggtaaaaggacttgcacagaaagcaccacatctgacccaggaatctaggatctttctgatagttaagagttttaatagagagtcccaagatactagcttctgggggcaattgggagttttcacgtatatgtgtaatgttaggtaattgacatattatggggtacacaggctggtttttgccaagatgggaagcagcatgagtactctcctacagattccttctggctatgaaataaaaacatttcccacatccctttccctcaatgagcagaggatgaggttaagccacctttgagctcagcaagaacccttcccaagctacaaacggtagtcattttgactcatttcacaaagagctggaatatcaatatccttggaaagcatttcattaaaccaacaatggtacatggttttcattaaaccttcctaggctgacattctctgaccactagagaacctgtattctacggcagggagagagagtgtgtgtgtggtttgtgtgtctatgggatatgaacatttctcagcttgtttatttctgtagtgattcatcccatccaaattcttacaacaatacagagattgagagtttgactcaatatggatatacaatgctctttatccctgaagaagaaacgagtttaaccagtatatataatggtaaagctaaagagttaaagttgtttctgggaagtttttgctggatatcttgacaaggaaggccaaatgatatttacaaagatgataaacaataaattatgccaaagccatcatttaaatggtgtatgaaaaccactattaagtactagaatcatgctgtatcgaatactgaagttattactatactaattacattgagttgccaagctttgaaaagatacaacatgcctgatcgttaagccagtctgttcttaacttgagccataataataactgaatctgtacacagtatgatctttataacccttctctttcacatgttttaatctaaaattgtcactctgtctcctgcttttttttcccattgagataggggaggagcgtgcttgtgaactgcagttatgtgaggtacagcaggactggagaagggcagtatttgactaacactccatcaaagaaaagtcacaaaggattttacaacttcaagagtgttaatttcttatgcatgctaagattattaaaatagagaaaatgacctcatatggtcttcacatgttttacatattgaactgaagtttatatttctaaacctgattttattattatctggttaaataacaattttagcattttttcataaggtatctaaaaacactgcattgctcatatttttgcactctagagattagaaatttaatgtcagaccggtaaaagaggtctctttctttttcattaaaagctaatttaaatgtaaagctgacattttttatgctacagaaaaccctttttatcttcaaaagggcaaattggaaatacagctttttcaaaaagaaggccagatataacacatattttagaaaattaaacagggacattttagcaaggtatcttaaactaaaatggtatattcatcaccctagtctgaactgacaatactgggaagtggtgatataaaaggaattcgctactatcttgaactatgtgctaattataattggatctttgttatccaaatgccttaaacttttatccaactcacagattcagaggattttaaagaaaggcttaaaataacttccatagttaataagaatttaatttccaatgacataagttctaatatttttttttaatgtggtatttttatgcagtattaaaaatcagggaatgtcataaaaagaaataagattttgtgcttgatattgtaatctgattttccacttgggtccccaagtaaatccagccactatttccagacctaaagcagatgcttgaaacaatacctgcaacaatgctttgcagcaagaactgttaaatgaaatcagagatgcaattctaaacagagttgtgcataaaggcacgcaaccctggccacaaacaactcagcatctacaccgcactgctgccaatgccaggattcttccagtggtagcaacagatttctttttcacatccatagccctacactttaaaatgtgacaacattattctggaactttcagcaagtcacgtaagctctctaaagcttgagttcctccctggtaaattaagggtgtgatactagcatgtcccaagttaacactaacattaaccctatgagagaaagccttttgtttccttgacctatgaggtcagaagtggtgagcagcatggcattttggacagaatctcatacagccactctgtaccctcactctcataaatgaacagcctccctttgagaggtgagcttgaatggcagaagaaacatcatacaaacctaagtcacaataaccctgaggcctggatgagtcaacaaatcacaaccaattgttcatcaaagctgccccctacattcttagtaggcagagatgcaatctgaggtaattataagatatcctttaaaattctaaaaggaaaaaacatgtgggagacaggatgcaacaagatcagaaaaatgtgttcgattgttgatgataaaggttttggggggctcatgtactattctttctactcgtatgtgtttaaaaagtttcatgataaaattaaatatacatatgcatacacacacacaaacacaccaataggaagagggaattacccttccagcttttagacgatacacacgcccaagtcctgccctgggagagtctgactcagtgggtctagcgagtcacccaatcacggtttgctttttgttttgttctaaaataatattaccaggccaggtgcagtggcttacacctgtaatctcaggtgtgaaaggctgaggagggaggatcgcttcatgccaggagttcgagaccagcctgtgtaacgtagcaagaccctgtctctacaaaatagtttaaaaattaaccaggcatggtgatgcatgcctgtagtcccagctactcatgaggctgaggtgggaggatcccttgagcctgcaactttgaggttacaatgagccatgattgcaccattgcacttcagcctgggtgaaaaagcaagaccttatctccaaaaataaacaaacctttaaaaaattaaatattacagatgccactattgtgaacttctggttaaacaccattaacctgatcctaccctatcattttataaaagaaactgaagcccacagaggtaaaatgacttgtcacactcactcgtggcagagctggggctatatcctcaggccacatgacttctgaggtgtatgtgtgggtgtagatgtgtgtgttatcaatcccgacaagttaaagcctatcagaaaatgattattattaatggtctacaattttcttatttttcctccaactgtttcttcctactataattaatggataagacatactagtatttaagaacatctacatttggaccaaacactcagtatgctgtagtcactaaaaacatttgcctcatgaggtaaattgagtacatcttaaaacctggctcaaattattaattaactagtgtagtctagcacgtcttaataatacaaatgcccaattataaacggttagttttaatagcatacaaaattattatttttttaacaggggtgtcactgttttacccaggctggcatctaactcttaggctcaagtgatcctcctgttcagcctcccaagtagctgggactacaggtgcatgccactgcattgagtcaaagcctcttaaaaatattaccttgaagaatgtttatgatctatagtctctttcactctccaatccctggcaatctagctttttccataaattaccattgacaatgctttggggaaagtaataattaaccttcaaattcaaaaacctttgttcagtgttaaccttactcagtctctctgcagcatttggcactactaaccaagctctttttacttactttactcttcctgcctgggcttcagagaaaatatacatccttcaactttctcttacttcctattatttcctagcctccttcaccagctcttcttgaatggcccatacttaaacattggaatcccctagagatctctctttgtctctttattttcttactccatatatccaccttgtgtaatatgaaccactctatgacttcaacaacaatctctaggctaatcccaaaggtgtgcctccaatgctggatgctccttgaaattcaggcccctgtagccgactcacacaggcacgttaacccaaagtgtcaaaaactcacttttaagtctgtcccccttttgcttgatgctaaagtcacccaaggccaaatttggcaagtcattctagattcccttcttcttccacattcttcacatccaaccagtatccacatgttgcagggttcctattggctcacattctaaacttctttcgattctcaactgggccttggctctagcccaggaccattttaagaactacatataaaacatattttataacagcagtaatccatgttcattgtattaccacccataagcccagagttttggtatatatccttcttagagtccttctgtgatctatggagaaacagagaataatggtgaagagtccatggatttaaagtcatatagatttggtttcaaattccagctccactaattcctatctagataaccttagtaactttaagattgctaattctcactttcctcatctgaaaaaaattagacaataatacaccccaattagactaccataaatattacgagacaatatttgtaaaatgtttagcattgtgtctgacctctgcaaagcattaaaatcatagctattaccccctaaaaatatagcactacaccattcactgactcgtaacttcttttatcacatagtaacatattacgaatctcttcaatgtcaagatacacatttgtacactttcatggtatttcgctgtatagatatgccataatgtatttaactagccacctctgttcttttggattatctctaattttggtcagtgtaagaaaatggcaatgaacttaaccataaatatttgcatgttcatgctattactctctttggaggaatatctgagtccagtgaagagcatggctttcaggactttgccacatgctgctgttctctggaagaactctaccaatttatatactcccatcaacaaggaaattacctaccatctcctacctaccctccaatcttacactccctcaaatctttccttcacctttcagcagttccctgtcatgcacagaatagaaactttgctatcaatctctcttaaggctcactcctgctttccctctgcccctgtctctctatgcacctaagtggccagttagtatgacctgattttctctccaaacatttcaaatatccccacttaaatgtccaatagacatcatactcaatatgtcctaaattgaaatcatgaaattgaaagcaataccatccttccaatttctcaggccaaaaatcagagtcatttttgacctcttttgttctcctacatgatttccatcaggaaatctcaatggctctaacttcaaaacaaaatccagaatccaaccatttctccactttccgatgctgataccctggtctgaaccaccattatctcttacctggattacaagaacctcccaaatgatctccctatttttctttgctcccttttagtctattctcaacacaacagcctaaggaatcattttaaaacatagtatagattttcaagcctttgcttcaaacccccatttcactcagagtaaatccaaatttctaatgatggtctatctacaaggccctatgcaatcttgccccattgcccctctgacctcatttcacactaccgttccctctgctggcttcactccagctacactcactccttaaggtaagttcctgtcttaaggttttttcacagactattctttctgcctggactgagtttcctgagatatacacacaactcaactccctgcccttcttcttgtctttgcttaaatgaataatatccagaccatctcaacttaatagtgccaggggatctccttcccaattccccttgttctgttgtttttattacttttggaggataaatcacatactaacacattatatgaattacttcctagatttacttttatttttagaatttaagctctggaagagcagtgatctttgtatgttttgtccaataatttatatttcaagtacccagtaattcctggcacacagtaggcacatatcaagtaactgtttaacaaatgacaaaagctacccccaggcaatttcatgccctatagtttcatattgcatatttaaatgatttggaggagagtcaagaaactacagcaaccagacagaatgaaggagggggcatggcttacagcaaagtagatggtccatgttccatgcaaaaggaacggctcctactcaaatccagggaattgctaccctgatggaaagcaggcctcttactgccagaagatgagggatgccccaacatccatttgtcattaagacggtggttcaaactttcacattaaatgttttagctttagaattctggcagttgccagttggaagcaacatgcaaaaaactcttgttacttagtaacttaccacatatccacagtatttgaacttagcttgcacctctacttgttctgtaattgctttgtgtgtctatttactctccctaataaaatggcataattttttttttaaattttggctattgattagaatttttttttttttttgagatgaagtctcactctgtcacccaaactggagtgcagtggcgcaatcttggctcactgcctcccaggttcaagcgattctcctgccttagcttctcaagtagctggactacaggtgtgtgctaccacgtccagccaatttttatatttttagcagagatgaggttccactgtcttggccaggctggagatgagaatttttctaccaaaatgacaggccaaacagacctccaccatgggctgtgatgtcagaaagcttccactgcaggttagatggctcttctctagtgacacctgaacaacactgatttatttttcacatctcagcttgactccccagtgaagcctctctcatgcttacttcctgttttgtagattacggtaccctggtcaggcttcaatcacatacctctgagctacatcccttctatatgccttctcctggctcctcgagggtgagcacccagctccctgactccctgggaacacctaacataaagtgggggcctagcaccaaggtggcaatagcattttgttgatgagtaactgaatttcacataaggaaagaaaaaaaaaaactcaaagaggtaaagttacagctaatatgtgatgaaactgatatttaaatcccaagctttaaaatgacaatacagtttttaaatagtacagagatcattctcagaccagatcatgtctaactatgccaaagtgcaaactaaagaagttaatgcttttttttccataaatgacaaaattactaaaatattccatttccaaaaagtaaacgtttcagtttttctaaatattatttaaaaggtacaccccaaatgtttccttaagtagatcctgagcttcagaatatcacagctaaatgccctataaaaagacaagactataaagtcacttaatatgaataagaagggctacaaaacagacttaattcacatatttacaatggtcttagaggtaacagaacattctaaagttaaccaaatgccaaaaaaaaaggctttctaaaagcctttaggataatatcaaggcctttctaaaaaaataagcatatttacaacttctctttatgtttttaaagatatttaaaacttgatttaaaatgttttacaatgccaagaaagtatcattttttaagagtgagagctataaataaatctaagagaaaaacttcgtttttatgattactggatccataagcaggccaaaaccgaaaattcagacaaaggcagataactgcattttcacattattccacaagatgtcagcatgtaactgaacaacttcaatggtggtggtagtagggaggaggtggattcacttaaatagaacaatagaaaccctttcatttcatgaacttacgctacagctttggtaacttacttcataaatgtatatccatgtatattttattattgtaaacccagttcttaatatactcttacagtagtttataaatacagatatttaggtatttcttttttgaaacatcttaatttttttctttccaatttagctctcaaaattcttctgatcaaattgagaaccttcaaatacttattaaagtccaggaataatcctaggcacaacacaaacattaacctatttgtccatctggattagttatttttccccattctacagatgagaaaaatttagaaaaaaatgtcagtggttcacatgatgttatttactcactatagattatatattcagtaggcgactagagtctccgcacgagaggtagaggtaggggtaggggtgtaggggtgtgtgtgtgtgtgtgtgttcagtcttgtcttgatatcttcctttgttccccattaacaactcacatgctgagtcaccaacacctgaccaactgtcaatactgatcattagcagcagtagtaggaagacagttactgatgtctttcacttacaagtagcaccacagcctaataagtggcagaaagtcatactatgaaaacattaaataaaaaattttggtattaaaaaaatacttaagatctgaataaatacatatctccactattttcttacatcatttgtactcttatcttgcttttcatatttttctcggtcataagccattttcttcagcaatttcttcatggctcttttatcctttttatgattttccgtgttttgcttcctcacttggtttacaataaacttgggaatctatagagaaaaggaattaagcttagagaggaaaaagaaatgccaccattttaaactacaaaaaaaaattatatttttttaaatttcaaaaacagtaaagagtttctctttttgataagactgccattttacatgcactattcattaaatctgtgaaaagaaaatacttcatattattcacttaccaggtgtacagggcatccacgtggtataatttgccacccactgtggaaggttccaaaagaggctttgtgaagttcaaggacatagtggccgttttctatgccagactggagaccccctgaggtgacgagcagtagaagccacctccgtaggtctttccttttgcagcctcctacctacagccctgctagctaacctcaagtccccttctaataaccagctagccgctgctgtcatgagagaaagaactccccaagaaacaagagctgataggtagctagcaaaaatccagaacaaatttatcctaagaaatcacattagcaaaaacaaaatattttaaggtatcaaaatgtaaccatgaaataattttgacatttcaaacattgagatttaataaatggacattaattttttattaaaaaaacacatttgaaatcatctacatcagttgtctttttatggattataaaaataaagacttcaggatctaaatatcatcactctgtctttttaacaaattaatgtttggaagctcctcaaataagagattgaaatattcaatattataattttgcttggaattcctttaggtcattttttcctaaatgcttataagatgcctcctgaaaaattataaatttcattggaaaatgagcacctaatcaacgaagcctctcatccacttccatcctctgataagctgtcaaaacaagctcaaaataagtgtaaaacagaggaaaccatttttgaagatgttctcagttaataagggtacaaaatgcatgcatccctttcaataaagggtctatgaaaaagaactgaataatctgaaaccaagatagcatgggcttttaaaaatacagcaggcctaaacactgagaaatgggaaaataggcagaagtaaataaaaagtacttcttacaaggcatgttttgacataattttaaaacagaaattcacagggccctccttacctatatgaataaaatgtttttaatattttctgcactcacaaattttaaatgtaaattaataaagctaataacaaacatgcaatttgttttttaaactactaagaccaaagcatatgatatatacttactgtccacagaagtttttggtacttaatcaataagtgcatggtatttgctgtcccagctgccattacaaattctcgctgttcactggacttcaatcccaatgcatgacacataaagagattcggggccatgaccattgctacattcatgactgtcattttatttttttctttattatctattactctttggagaaattcaagaagggcctgaaacagaaatgactctttgagatttgtgtcatatatgaagataaaagattaaagcactgtagcatatgcaatttttatttcattgaaaaaacaagttgtgtataagcacagtcaactaatcacatccagcaggccctgttaccaaagcttctccatttggttgatgctccctgagatggaaatttgcttctactaaggaccatggtgctggggaatgaagcagagatggcacatagctgaactagggagcagagagaggagtggggaagtgtcagacctctggcctatgggagtcatggagagctgaaaagtaatgtaaaacatcatacaaacatttgcttatttcaggaaatgctgtactttcctatgtagagatttttaaaaattccctcaaaaagggtcattcaacttcagtctcatttctttaaggcaatcaatatctggctgatgtggaacttataaagaatgagccaggcactgggtatggtggtgcatacctgtagtcccaggcactgggcatggtggtgtacacctgtagtcccagatcggtgggaggatcatctgagcttaggagtctgagtccagcctaggcaacagagagaaaccctctctcaaaaaaggaaaagagaagagaagagaagagagaaaagagaaaagagaaaagagagaagagagaaaagagagaagaaaagagaaaagaaaagagaaaagaaaagagaggtgagggaatattgtgatagagaaagcggggaaatgaggaaagaccaaagagaatctttcttttttttttttttgagaccaggtctcactctgttgcccaggctggtgtgcagtgagagatcatagctcactacagcctcaaactcctcggctcaagtgatcctcctgcctcagtctccagagtagctgggaccacaggtgcatgccaccatgcctggctaatttttttgatttttcatagaggcaaattctcgcaatgttgcccaggctggtcttgaactcttgagttcaagaaacacttccacctcatccttccaaagtgctaggattacacaggtgtaagccaccatacccagctgagaattttttttaaaatgaatgaaaagaaacttttcatcagaacaggttaggttatgctcagcttgatgccacgtacacccacccctattgcagacactcattgtcctctgaaactaccttctccaaaaggcaaatgcagctgaggtcaccctactctaacatgacttaaggcttcagatttttcttttgccttcttcttttgttctagaacaacagtaactataactgcacaggtattcaatgttctctatgaatgaggcagtttatgaagcacgatagagattacttaatcctaacttggagacagatgctgtaattacctccattttacagatcagaaaacaatgtttggagaatgtaagtaacttcctggtggtcatacagctaacaaatcctgagaaagaatttaattacaggtctatctggcttttgtttctaaattcttaactattaaaagaatcattttttcagagttagcctaaaatccctaccctaaaaaggccaaatatactatactaaaatggaaaaaggaaaaaaagtatctatcttccaaagaatttctggaaaaaaaaattcctgtaagtgctaacaggttgcttttgaatcaagtataactgctatatagaccttgaaactttgaaacaaattaaggacagagctttaatatctaacaatgagatttatgtatctaatttctagtacagtgctcaggaagttaaattgtaatccaagcataaagttatataaaacaacatgttctcaaatgaggacaaaagattaattgaagtttggaaaaaatatttaattttgttccacagagaccagaataattgttcagggaccagtgtatctctttctttatgagcataaattacagacattaggtaataaaccgttttaattgtggtgtgcatatgtaataacgttactcaaaatactactatcagaatactagagaataagagagagagttgacataaaattaacgagatgttagcccagcccttgctgaaggaactgcagaattttctatctgaaccttcagaatttcccctttatatatatatatatataatttcaatagtttttgggatataggtggtttttgcttacatgggtaagttcttttgcggtgatttctaagattttggtgtgcctgtcacctgggcagtgtataagctacccaatatgcagtcttttatctctcacccttctcctacgcttccaccgagttccaaaagtccagtgtatcattcttatgcctttgcatcctcatagcttagctcctacttataagtgagaacatgcaatatttggtttctcattcctgctttacttcacttagaataatggcttccggttccatccaagttgttgcagaggccattatttcatgctgtcttatggctgagtagtattacatggtgtatgtgtgtatgtgtgtgtgtctgtgtgtatctatcacattttctttatacactcatgagaacttctcctgtttcaaaaaatatttactttatcactggcctggtggtatcaatcaccgggttcactctctgaaaagccaggtttgagtaccagcacaattacttagtagctgggtatgatgttacatctttacatacctctgctctttaaagttttctgatttgtaaaatgggagtacttatctctcagcctggaaggattgaaacaatgtatataatgagcttcttaaaactacaaaaaagataaatgtcaagaattatattaacatggatcccctcttgctatcttaaaatcagtcttcactattgttccaagtcaaaggtaggtgtgatcattggtccaaatgcaccataattcaaagtgaaaagtaactgtagttaagcagcttgcccaaacacacctgtcactttactaccacaccaagatgtggtatttaacatggtgcctcctaacccttagacttgctgtagcaatattccaaacaaccatgcacatgattctgtccttcagatgacaactgaaggcgtgctgctagcactggataagtcagggaattttgcgttagacttcctgaaattatattgcattggagtttcccttcccttttacagaactaaatttatggcttattctttgcacatatggcattcttgttcaaatgttctattattaaagttctagtttgaaaccttcagcagagctggctaattaagtcactaaagcttaagtaaacatgtaaaattacttgtttgcatcttccagttttttaccaaaaatagtactccccccccccttaattataaaattatctttccgatagcctcatacacaaaatgtaagaactatcctataattttaaaactattttttaacagaatttttaaaagaatatgcctgggactttgagggcaaagcccgaagaagagttccagctcagccacacccaaagcagccatattgaattgaatgcttcctcctacaactacttgaactcatttgaatgtaggggtatcttaagtaaatcataagttttccagtacccactgcacactgggcattgatagggtcgtcaatgagtaagaaaaagatgttcctccctatttctgagtagttgaagccctgtgtcgggagcactgctgacaagctgaggacatgttagatcgtcagccccactttgtcctgggccatatgtccctgtctcagccacaatctacacacacttacacagtagccctgggcacacactctttgaatataaccctttctgagttgacctctgtctcaaaagcaaattgaaataaaacctaatgctgtcttctgggttattcatttgacaaccagtgaagcaaaaggctttttttctgatttaggaaagggaataaccctttggaagttctcctgtagcggacgtagcgttttacctccagtaatccccataagctgcttcatcaagaaaagttgagtattaatattcattccatgggcattaaagaactatcactcatgcagttacaattcaaggagttttaatgaattacaggaaaaaaattccaagatgtaccaactagtaaatttgttttcttaacttgaaagctcttgtcatgagatttcatcttaaatagaaaaaaatgaagagggtaaagaagccctttacccatataaaaaatatttttaaggcaagggaaaaacttaagataatacttttactaagttaattttttttcctttttctaagagtttataattaaaccttttacaactactctataaactctgctgttaaggaaaataaatcagtgtggcacaatccctgattataagagcttctgacaacacttaaagtagatgatattaagttatataaacattagagcaaatcacttcaaaatggtgatataaatcagaaactccggatgaacccttagagaaataattagaatttgtttgagttggtctatcttttggctaacaattgtgtcaaatcaccattatgactcacttcaaaatctaccatttcaaactacaaactgtcatatctttaggtagtagtgggttatatttgataaaacttaggatttttgttttaaacatttatattttaccttactgctacctgcttattaaatataatttgataaatgcaaaaaaaagaaataagaaggagaaaaaaaacaaaaaaccacccacgtttccattaaccgacgaacctcaatcgtctggtttggaagaagaaatgttacagtgaaaattaaaaaaaacaaaaacttaataacattagtaacataacaacctcataaagagttaaaggctttcaccctctgtccttaaaagtaggctttttctttatagacttttatgaccatgtccaagatacacatcttattgttttgccacaaataatgaaaaattactgtgcttacttctaagggatatttaatgtaaattaaccaagctgaccttcagtgtgtccctgtttgcatcaggtaggaggatgacaagaaggttcaaagcctgtagttgctgcttcttggttggaagatctgcagacaaattaaataaatctgaactcttttcttcagtgaacattttcctttactttattttttcactttttaagaaaaaagttatttggcataaacatgactgtaaaatgtaagacacaacgactgagctgcaagccttgttgagagtgtgtttgtgggagatcagcagaagcagctgctgttaggagcttcctctctctcagaatgctcacttccaactgtgatcatatgacgtgcggccttatgtttgcagacacacaacagtgctttggaaataattttaacttctgcgtgataattattccccaatgaaaagacatagaggattggaccttccatgatacagtatcagggtgcgtccgtaacagtggtttgtttcttttaatggcgagtgaacaaatgcatggtaagagtccatcagttccaacaggaatatgtaaaatagggcctggaacacaataggtgcttataaatgcctgtggaataaattagaaaacgaagcagcagctcaacagtctaagaggtgcattattatcattgatgttatcattttcagcagcccttaccccatttaagtaatactcatggatatttagaatcattccagcatttctttttcagcaataaatttggtcctttaatccatatccaggaaatgtatgcaacgtagcacaatttaaacattaaaaaatatttcccacagaaggtaatttattctatttaaagaagaaacatgttaagaaaaaaatactttaaacagaagagatttcagttccgtctctcctagaaattctgaagaaatgtcatgatacgagatgactcatgaaaccatctcaatattgtatgtgttaagaatagcctggtacagttctggttgaaactgtagctcaccgcaatttattctttttttttttttgagtcagagtctcactctgtctcccaggctggagtacagtggtgtgattttggctcactgcaacctccacctctcaggttcaagtgattctctgcctcagcctcccggatagcagggatcacaggtgcgcaccactatgcctggctaatttttgtatttttagtagaaatgggatttcaccatattggccaggttggtcttgaactcctgacctcaagtgatctgcccgcctcagcctcccaaagtgctgggagctcaccataattattaatagtgccccttttcattcttataagtgtccctgtttaaaagataaagatacagttacttgaaggcagtgatggcatttttacttttcttcatggcctctaggtgtaaaatggataattaggccagtagataaaccttataagatctaggttcactggaaaaagaatcgagaactattagagacactaatgtgtagcttgcccaagacgacaaaatggcagtacataagaagcagcttgtgaccttccaccaatgaggcagcaaaatgctttgctccacacttctgcatgacaacctcagaatttaatttttcaagaaatgctcagagaccctaccacttctccttgtgcttttatgataactgttcatccacagcttctccagtaagtgttgctttttaacacttggcaagaaaattgtatcagagatcttatgtgactcattctattataagagaaacatgaagtttccaggttttaacactgaaatatattgtattgcttaaatgtcgtgcaattaatctgtacccaaagagaacattctgttatctgtttactcaggaatgcatatttataagaaaaacagaaaacaatgcatggcagctgagcacccactgacatcagttgagtcaatatgtccacccaaatacgtctggttgcgttctttgtgatgccaaatgtcattaaaacaattaacatagatggcaccagcagaaggactgcttcaaagagggatagcacttactctggacagcctgaaaggctttgagatactccacactgagcagtggctggggcaactcccgaatgaagagcttcagcaggctggcggcatcatgctgtttgacactttcccaattaaaagtcccttcataaaactttgcttctagttcttggcaaagattctgataggcacgaaaaaaaaaaaaaaaaaaaaaagaagcagctagaagtgcattttttttcttgctgagagtatgacacattttcactttcaagagactctgctctttagacaagacaaatcagactaccaaaagtcaatatttcttttactcagaaaaaaaactactcctctcctctaatccaaatgtactttaccaacaaaaaactgtacctaaggccaaaaaacattttaaaatttatactttttcctggacattccacaaactgtaagtaataaagttttaattaagagactggttaaaataattgttccatttgggggcttcatctacatattataaatcttcgttaaattaagaaaaaaatcattaaaaaagaagtatatgttttaaatttagaagtatattacataaaaaaatacataatcagtctctgggactaaaacagaaggctacctctgattagtcacctacgggaaatggaaaacccaattttatagtaaacgaggcaagaaaatacatcaatatacctgtctttaatgcacagccatcctgctgccagctgcaaaaaacagtctgagtccatgcagaattagaaatatctagttcacttacctcagaactctacaaaatttgtcaggcaaattattactaataaatcaattgagttttgtaattactattttttgtatacttctttactatatataaatcctatcacgttaaaaaccatcacaagtttctgtcactttcctctgttacatgaaaccattctcccaaagtatgttctttgttttcttgtaaggcaaattaccacattttctcttcctaacacaacaaccattctctacccccaattatttttgtaattgatgaaataggtgaaggggagtggcaaagacagaaaaagaaatagagaggagggaagagggagtgagaaaaggaggaagaggaaaaaaaaaagaggagggaggaaaagatagaaaaagggagtgggagatagggagggaaggaagaggagagagagggggcatggagggaaagaatgaggggggaaagaatgagcagggaaagaatgagggaggaaaggacaacagaggaagatccagagaagagaggcagaaaaaatggagggagagggagagagaatagtacagagaaatttggtggggccagggggaaaagagacaaccaacatttttgcatattatcttttaaattatttataatggaccagctgctgcataatttggcatatgacaacaggctgggttgaagagttgagccagctgaatccacttaattggccttcttagaaattacacttagttaaacttgtccttctgccagccttctcgttgcaaagtaaaatctgcattatattcactattctgtactgaagtaaatgtatttttgcctcctgtgagctggccattgcagtctgctagtgagggcccgagtgctttgaactcggtgaattgaggactatcttgccaatgtgggtaatatgaagttatgtttgttacctgtttctgaggaattatatctttgttagtgaatgtacttaaaagaactcgtctcagaatcacacaatgtccactagtggcaaacgtgctataggtgttacatgaagtgagacaatgacaagctatgaaacttacaaacaccacagtttcagggagctctaagtaccagacaccaaacccaggggacacaagtggaaaattatgatcagaatatatcaggttactcgaatcctattaaaatgagatcactatgtagtaagagccaaggaggccgaaactggtgtcctaaatcaaggcaacttatcaaaaaaagcaggtgatgcaaactgtgaaatgtataaagagtaattccaatcctggcaacaccacagcccattagaagcaggccaggacagtgtgcactccccaagaaacacttagtcctgatccagctctaacgatttcataaagaatggggttatgaaaatgaagagagattctctctcttttctcctattttctcttggattttcaaattcaggaagacaatgtattggatgtgggcagtggttacttgtgctatctcagtgcagagctaaaggtgaatttggaagatagggtaaaagttagtagttaatggctgcttccagatacagctacaattccaagtatgagtcccctttacatttaaatcccctgaggggatatgcagtatgcatcccctgtagggtaattccatctttatcatgcattcattggaagctttatcccccaggccaaaaagtgaggcacaaagatgacagcaggaggacacgtggtaccctggaacagtgggaaggaactgtcatccagagagaagaaaaggcaagggagaagggatggctcaaattgggaagtctaggaattattctttcaccagccagactcaggctaccctggatgcagcaagacagggaactgtgtgaatcaggaaggtggttgagagtgtctcgtctggccggctcactaagactaattatgcataggatgtcaaggtcccccatctgcaggagtctatgatcctggcctttttcttttttttttcttttgagacgaagtctcgcactgttgcccgggctggagtgcaatggtgcgatcttggctcactgcaacctctgcctcccaggttcaagcgattctcctgcctcagcctcctgagtagctgggattacaggtgcccaacaccatgcctggataattttttgtatttttagtagagacagtgtttcactattttggccaggctggtctcaaacttctgacctcgtgatccgcccaccttggcctcccaaagtgttttttcttttatttttaagaaacagggtcttattgctctgtcacccaggctggagtgcagtgggacaatgacagctcactgccacatgggactcctgggttcaggcaatcctctccactcagcttcctgagtagctggaactccaggtgaccaccacaatgcctggctaattttttaaaattattttttgtagagacagggtctcactttgttgcccaaggtggtcttgaattcctaacctcaagcaatcctcccgccttggcctcccaaagtgctaggattacaggtgtgaaccaccacgcccggccctgacttccgtaaactcaattgctactactcatcctggctaaatctatcacaactatccccacgccattaatattttaactcatcacattcttttgtcatagtattattataggtaatatggtgattttgaaaacaaaacaaaacaaaaaacttagcaaaaaccagaagggactgtagaaaaactaaactgaatggtaaaaggttttattgttttattttatctactttactaacaatggaaaaaaggggtagagaggacaagttagcttttaaaatgcataagtgtaaataaacaataaaatgtttacattagtagaacccagagattaccttgattctaatggcagctccagggatccgtaagaggccttctgtttccaaacctctctcttcaattcgagaaatcagctgtgcataaacagagaaacattctaatttccgtatttgtaacaggtacaattccgaatttaacatctgtttcacatataaataaaactgattacaatgacatgtaaactggattttatgaggttttgaatgctattttactaccactgtccttcaaaacaataagtccagaaacttttgttataatttagaaaaagttgggccttatgctactttataacagaagtgtgtaatttcacacaacagctgtggtactccaaacaaacagaataaagatgttcactgtttaaaagcaactaagaacatctatttattctgcttttccagaaacctacattctgcaatcaaataaatcttatgaaaatctagcatttgcatatttacatctcatttttagcttgttccaagaaagaattatttatgacatgcagaaaaaagactgtttgcaaatattcatttttaagtctttggtgttaaacaaagaaaaatgtccttgtatatggcctctaagtcatacctgatgcccaatgaatacgctgatctaactccagattcccacaaaaagcatttttttgtttttgttttttaaaaaggcagaaacccgcaaaaagaaggcaaatggagaaattacaatgactactggaggctaagaagacaataagagtggtcagattcttgataacgtgatcttcttggagtaggcattccctgagcagtacacaaaggccgtataaaacatattctattttaagaaaatcagttttcctgtcctcagtttgaatataaggcatttcctagcatcatataggttttcctccctggcacccactctcatttcacaattgccttccctgctttataaaagacagacctattcttcactcatccacagtcttactataatattctctgcatgccctaaggcataaaatcttctagagtatcaaaagaatgtaaaaaaaaaaattttcagggaagcctcctttaatgattaaacaaggctctataaactacctggagcttactgtttttcccttgcacataaaagtgtctgttaggagcaaagcatcataaatgaggtattttgacctttgtctggatattctgaagttagatatattgtagtatgtggacactggaagagatgtcaacttttctttaaacacttcacctcttctattcctgggttatattatggccaaagatgcactgatattgaggaagtcagtaagaactaagcatagcagtctcaaaattctcctaaggatttattattaggaaaagagaagcatctttgatcagtcaaagcagtacaggatttttaaaaattcatctggagtaggccgggcatggtggctcacccctgtaatcccagcactttgggagggcgaggcgggcggatcacaaggtcaggagatcgagaccatccttgttaacatggtgaaaccccgtctctactaaaaatacaaaaaattagccaggcgtggtggcaggtgcctgtgatcccagctacttgggaggctgaggcaggagaatggtgtgaaccccagaggcggagcttgcagtgagccaagatcgcaacagtgcactccagcctgggcgacagagcgagactctgtctcaaaaaaaaaaaaaaaaagaaaagaaaaaaaatttctggaatattttccaagaccacatttttcaagtaacactggataaaatcccatagcaaaaattttaggcgaattattttagatcagatgggcgttattcaaaataaagcatttaaaacctaatgtaaccaatattcaatgtatagccaattttcattttatttgatcttataaaatgtttaaaatgtttctagtcctattaacaaaaagtacaattgtatgctagctgctggagcaaattagttttcagcaatatatgcctttcactttcattaagtacacaggaaaaagtgattgtgacttctaaataactgaatgagcgtaatttctgcattttaatatttgagtccttttcattattctctaaggctaaaaaccagcacccaatagagttacgtacatatatcgtcagaaggaatgccatgtgttttcttatatatctcactgaaaataacatttttagctacattatattgcattattaaaatataaataatactttatagcattccttttattatcaggattaaaatagagatgaaaaataactatattgactcatacattttaatgatgctgttactaatgtatctatgttctgtaatttatcagtaattttcatagcatttctcaaaatatatattacatacttatgtgaattgaaaaatgaaatgaaaacacagactctttgacacaaagtatggctgagttggctgattcatttgacagtgaaaacactagatttgataattaggttataagacagacttttttcatagattaaaattaacaatatttctatttccctcatccttctgagaacacaaggtttaaacaatgtacctctgagtaaaataatataacaggtacaggttcatagatattagataagctttgttagtgtccttttcgggtatataagctcaaaaattaaattatagtcctctaaagactggtaatgaatcttcttgcaaatcagtcgtttctaattttttccattttacaaaatacagatatgacctaattgagttgtcagctgataaatcaaaactttttttgtgatagatcactgtgattttttgcttataattcacaagggatgcaaacagatgagtgttatctacaagtaaactttttatatgctcctttattttttatagaaacaaaaatactttagggccattatccaatccttcaaatagataagacagccagagtctgcagaatgttaagggaccaaaaatgtaaaataaccaactaaataaatttaaaaaaaaaacttcaagagaaaatgacaaaggaagatttttcttaatagactggatgcaatcctcagccggatcacgtggcatcactgaacctccacagaaactgaagctcactgtatttctgtggtgtgatggtgaattttgtgtgccaatttggctaggccatagcgcccaggtgttcagtcaaacagcagtctacatgttgcagtgacagatttttttttttttttttttttggttgtcacagtagactgtgaataatgaaaattatttaatactctctataatgtagtgggcctcatccaaacagttgaaggcctaaaagattttggtttcccaaagaagcggcaattttgcttcaagactgcaacaaagaaacactgcctaagtttcagcctgcagagtttggactcaagatggtagcatcaactcttgcctgagcttccagtctgctagcctgctctacatatttcagacttgtgagccccacaattgtgtgagccaattaaaaaaaaacaaatctcttcctctcactctaaatatatcctattgcttctgtttctctggagaactttgactaataccccaggaaaggatgctgctgagatccctgctttgtataggctttggtgtatagtaaattgcaactgctactgacagaagaatttgaatatgtagcctgtatttgtcagcctcctcctgttaatcacaggtactgctgacagctctccatagatacatgttctgcatgcagtggctaaaagaggctgatgggtgggatcaactgtatagaacaaagtttgtcaggagaaataatgagatgcaggtttgaatgtagtggtagatatgaggggaaaaaagcaccaaaggttagtaggtaagacggaattaattgactggtttggaagaggggaagaataagtgccaagtagattgagccttagtactggatgagtttgctgagccaattaactgcaaatcaatttctactgtcccaagaaatttcagaaacggtgatatgcctgggctgctgcaaagaatctacggcttgggtagttcacaactgagttgacctgtcttcctcactgtgcattccctagcttttctcaaatgtaatctgtatttctgaacaatgatggctcagaggttggacggaaatttttatattgccacagataatccccttatgaataactgagtgttgactacacaagtgacttaacagtttagcaatcattttctaattctactttatggtttctttgcctactttggaaataggcactggtaaattaaattggacatcctcactgtaaatagaaaagctgaggaaatatacacaggcatgaaatattcatgaggatgcaattccctagaaatttataagcagttcccactcctatgtattatagaattgaaatctcaattatacaaagccagctaatataagacaggaaaatgacgccaggtaatcacagttacagtaataacacagaaagcatcaccatgaatataaaacttatgagcccttgaaaccaatttgcttcctgaatagaaaatcaaagtacaaaacatgacagtatatgaattggaaaactgtattataataatatgaatacaaaaaccactattagcttaagtatgttctctctatgctgaccaatccaagcctacctactttttgaaagatcaagggtattcgcattcctggtactttcctctgatcttgttctaatagcgctgtcaatggaacgcaaaaaagaccagaatctgcaagaaaaaaaatgaaatttcctcacttttgtcaatctataaaatattaatataaaaatgttaaagcataagatttctgatactgtcgatcagacaactatttatttagcaactactaagtgaatgacagcatctcaacattatatatatggtggccaatagtaaaatcctggccctgccttatagaggaatgtagcaaggaaagacaactaaacaaatgattgcaaataattaccaacataattagaaaagtgcaaactgctgcataagagaaacagagggctgtgagagcatgcaaaatatccaaataatttactaaatgtaatcaaattaaaaattcttacttaaaagcaaatattggccaggtgcagtggcttatgtctataaccccagcactttgggaagccaaggtgggaggattgcttgagcccaggagttcaagaccagcctaagcctgggcaacatagcaagactttatctttatgaaaaataaaaaaaaattaggcaggtatgatggcaggctcctatagtcccagctacttggggggctgaggttggaggatagcttgagcctgggaggttgaggctacggtgagccgtcactgcaccactgcactgtagcctcagtgacagagctgtcaccgtttttatcaccaaaaaaagcaaatatcattcatcttttccatattaaatagacattgaacactttacaatacagcaaaatacaaatatttgctttctaagaaatcagacaagatcatgatcttgttctacaaatgtttctctttagaaaatagatacttgctactcttaaatttaactttgtgattgtatatacttagaaatagctccagaaaaaaatgatggtaataatttacaatttttctaaattaaaatcatagccttgagtctggtatgaacatggcttcgaccaacacctccaccctgcccccatcactgagtggacggttagcaccaaagtgataactttttcctttatgacgtacatcagcatggaaatgaaaatcatctgtgaacatgaaaaaggggattatcttgtggtatgaggacagacattggatattgtgacacttaatcgagatgccattcaaaagaacgccagtaacccagtaaataacttttcagtttgggaattcggaaaagatgcaatctcaaggatgccaagggtctagggtataacataaaatcagtatcttggataagacaaacaggtattaaataaaaatggaaagaaagtctattaacagtgatagccttgatataaacaacttaacgtttctttgccaggatgcaattctaaaacataagaattaaaaaaaaaaactcttagccactttaaaaatcttgggcactgaaccacaactgtttaaattgtatttctattttacgtttggagaaggctttgtgtaagctaaaatactcaaaggaactaagcacagaatgaggtcttctggggcccagcatgacaggaccagaagggaaggtacacttcagtcctacagagtaattgcctctaaaacctaaatcaggtgaatacttgtctttgtgaatgttaccacagcaattcaataatcctcattcttggtttctctttaggagatacttctaaggttaaacaagaggacaaagattcctaaggtaaagccttgtcaacagagaattatgtggatttcaataccaataaattactggagaaacaaaaactgaagaggtatctgttctctattatatcattaaaaataaactgtttatttaatgggtaaagcaaggtacttacaaaaaaaacaaaaaaaaaaaaccactccatatttccatgatgagtacaatctagtggtattgttttgtcacaatggtggtattttcttaataggggaaagaatgtctttgcaaaataggtaaaattagaatgtccaggaacaaaggggcagactactaactagcccatttatttgctatccaatgaataaccaaaagtagtcacttagaatcaactgtcttaaagtcatttttcaagatctgattctggaaataaataaatatgtgtaccaaatatgtatctttttaaatatatagtttttaaaggagaaagcaaatgagttaagagtccttgcttcagaatttccttctatgagaattaaattctttgactatgcctttattctctatagtctaggacacagtgtatctctatcgttataaaacttttgaaggcaacatcttagaatataaactttagatgtattcaagtgttggtttattttgcaggtgttttccctgtctcccagaaatactgcaaaaaagccaagtccatccttgctattttagaaataaatccaagggtttatcatttcatgattaccttttgttttgattttcacagctttttgttgtttcagctcaatacccaatacatcatagagggcagtcagctcaattagggctaaatggcaaactttcttcatgtcctggggtgcgaggtcaccaatccttgtggtacccgttttgtcttttggcaatctgaaactctaaaataaacatcattaatatagtaaaagcttacagtacctaacctccattgtaatgcaggaaggaaaaaccaactacagaaagaagttatactcagaataagtgataagaaaagccacagaatttctccagtcagaatgaagagtgatcctgtcatgatgacgacccctaaagctgtggagggttcgggagtcaacttccaaagtctgacagacaacgggaacagaccgcaaactcggagtattaataccagtggctcagaggacaagagagacagtgaaccaggagaaaaagacttctagttaagtgaccttcagaaaaggatggctagaagtcaagcacaatccatgagggggaaggggaagaagaggtgggaagggaaggggagaaggaaggggagagagagggggaggggagggggaaaagaaagaggagggggaaagaaagaaggagggggaggggaaaaggggaagaaaagggggaggggaggacagggggagggaaaagggggagggaaaagggggagggaaagggggagggaaagggggaggggaaaagggggaggtgagggaaaaagaagaggaaaaaggggaggaaaagggggaggggagggagggggagggggagggggaaacggggacagtgaaggggaagggaagggggagggaaaaggagatgagaaggggagagagaaaaggaaggggagtgggcaaggggagagggaaaaggaaggggagcagggaaggggagagggaaaatgaaggggaggggacgggaaggggatgggggagggggagggggaaacagaggaagatgacatgaagaagacaagtaggggggagagaaagaggaatactagccatgagtgtatgcttagaacatgccaggtacccttcacatacacttatgtatcttttaattgtcacaaaagccaagtaagattggtccagaaaggctacagcccattggggtaagagggacacaggggaaacgaagagcatggacttcagagcttaccagtcacctatctacttactagttgtgtgacttatggcaatggcttaacctttacttctgtaaaatgggagatggagggggagggaaaggaggagaagggcaacaaaaagaagaggatgggccactgaattcagagggctattgtgagatttagtgcccagcactgcccaagtgcttttatgtggttgctactgcaggttgagtacacctcatccaaactgcttgagaccagaagtgctctggatttcagattttgaaatatttgtatatacacaatgagacatcttgggatgggtcccaagtctaaacacaaaattcatttatgtttcatatacacatagcctgaaggcaattttacaaaatattttaactaatttgaatgaaactaattttgtgttaagtacttatgtgtgggatttttcacttgtggcatcatgccagtgctcaaaaaggttctgattttggaacatttaggattttggatttttggattagggatactcaacttgtatattactttcactgctgaataaagtgggactaagatgttgcttcataatcacaagcacatggtgtgtttttctgcctttctcaaatatcatcttttaatattaaacacattaaacatcagaaagcaaaccacaagataaaaaggcaaatttcactagtgtgtacatttaatacaaattacaattccattgtgtttacctattactaaaactgatcattctcttacagtttgggtttacctttgaatttttcatttaattcaattgctgattagctgattttactgcatctattttattccctttgctttggtacttcttgcgtcttatcattaacacttcatcgtctaaatgctagggcaaaagacatgtcctaaagcagtaattctcaaagtgtagtccagggaccattgggggtatccaatatccttccaaaaagttcagaactattttaataattagtaatgaggcattattttgccttttacactctcattctctcgtgagtatagttttccagatgtaaatgagtgctactgcaacagactgaatgcaaacgtaaatatgataatccagctgacttcaactaaagccagacattacagactcactaaaattaaaaccatgatacacttaattttctttagaaaatatggctattttccattttgagaaaaagatatttatgttaactataatattgttatattaaatggattaatattttttcaatttctcaattttattttcagatatggtaagtgtccataggtataacccacataaacagaaggtttttgaggcccttaataatttttaagtgtatgaaggagttgtgagatgaaaatgttggagtcagtctcctacagcaactcgtaaaacctatgacttttagtaagtgagaaactaattccctttaagcaaactcaattcaaaagagagccttcaagtccactgtaagaggaaaggggtctttcttaaccgttcgtaatgtgttttttttcctaggagaacatcaaataaacagcaatggacatcactgaagatggggcctaagcaaatttccagcagggggcaggatggcctccatggggcactgcacagggctcaagagagtggagtcagactacaggtggcaaatgctgtttccatcacttactatgtgacctttggcaaacaatgtccccttctgtgccttagcctcctcatctgtagaatgagaacaactgaacctaacttacaaggttgtggcgaagatcaaatgataaatagcactcaaaaagtattacatattatatttttttcatggagcttttaaaataatatcaacatttcatggtcttcctttattcttatgtgtcatggcaaggtaagaaaaaaatgataataataattatcttatcgaaaaacagttcatttaatccttcaaaagtcctaataagaattattacagcatcttctaggtggggaaactgagactcagttaagtgccttaaacatggccacaaagccagtgatgtcatgaagatgcaaattcagttctcctaaatcgtaagttttgtaaccattctgttctactccatttttcccatccaccagagtaggcagggagatatctaggttgataggtgttgatgtggtactgtgagcccctcaaggagaggagccacttcttaatcacttccgtaacgctgttgtaccacagacctgacacactatgggtggtctgtcatggtccactaaatgaatggagacacacatcctacagggaggcgagcatagaatcaaactcaatgaggtggagggccattggcttcgtgttcccctgattttctgtgatttctactgagttttcctttttaaaaatcacacaaaactggtcacatttttcccatgtttggtcctatatttctgctaattgcttcattttctgaatgctgaaccaaccatatttaccttttttttaagccctaaatgtttcattaaaatcagttgctttgggtctaataagtcaaacacatgtaatacagccgtttaaagcattacccaaggtaaatgtttacagaatcctgaaatattattaattcaaacatttgatttacctagcgatatatgtcatgagcttatttatttatttaaacattgtgcttaatgaaggagttagttctttatcccaatgtttaattcatagcagcagctttaaatatttatgaagtttcctgtcgttttttgtttagttaatagactgaatggttcagttcattggctaagagaaagcagtgaaatttcagcaagagaaaagttctctacctcttgaaaaatgtgtttaaagaaaataagactgggcatggtggctcacacctgtaatcccagcaatctgggagactgaggcaggtagatcacctaaggtcaggagttcgagaccagcctgaccaacatggtgaaaccccatctctactaaaaatacaaaaactagccgggcgtggtggcaggtgcctgtaatcctagttactcaggaggctgaggaaggagaatcacttgagcccaggaggtggatgttgcagtgagccgagatcgcgccattgcactctagcctgggcaacaagagtgaaactccatctcaaaacaaaaaaaaaaaaaaaaaaaaaggaaaaagaaaagaataaaaattttcaaaaaaaaatgtaaggtcattgattcccttgtgttaccataaattaactaggtagctttccctggcgtgttgctcttttgtaggatttgcatgaggggccccttaggcatttcatcactaataataaacttgacttttttactcatcagatcactctagctttgacttggaaagcaagagaaaggattcaaaagcttagtcattaatgtcaagcctcagcatgtcaagttacctctctaacatgtttccatgtatgaaaaataggggtgtctacctcctagaggtcatctaataaataattacagagcataatttctgagatataacatgtatacactaagtagctaaattttcaaactaaagcaaattaaaggttataaaacctgatctccaaatttaagaggagaaatttgaatccacgatgagagatcataaagaattgacaaaggttgctcgatgctgtgaggaaaaggaagtgaatatgaaatgaggtcaacagagaacaatgtattacataaagcctactgcttatttacagaagtagaggagcatggaacagaaatggaacttaaggttttatctacttagacacctgcctcagagtagtgaatacaaatcttactttttcaaccatgggaaagacttgtagaaatttaacaatgagtccataccttctagaagacaaacggactaaaaaagagtttctatagatgagtatatgcatatttgcataaaaaaatacatggacagattaacaataatgtctaaagcatgcaacctaaatcaaaggtgatttcatatatttatttgatctaatataagttcacgatcaggaaagactgaacaggaaaactgatcttgagctagtctctgaagaatagattaaagtttccttggcaaatatggaacaacagaggggtagaaatggagaggtcattttaaactttgggcacaacttgaatataattaagaaggtaggtgaaggtaaattagttaaacagagaagaaaatggcagagggagttttgttttgaaagctctcaagtggagatgaattatatttcattccactgtttgagtcaacaacttaaaagccaacaatgacttcattttgtttaattagattctactgtccttcaatttaaaacctttccatattttgtgatgaagactgtcactttgaaaacatacttattggccaggcacagtggctcatacctgtaatcccagcactttgggaggctgaggcaggcggatcacaaggtcaggagttcgagaccagcctggccaacgtggtgaagccccgtctctactaaaaatataaaaaattagccaggcatggtggcatgtgcctgcaatccctgctactcgggaggctgaggcaggagactcacttaaacccaggaggtggaggttgcagtgagccaagatggtgcctgggtgacagagcgagattccatctcgagaaaaacaaaaaacaaacacacacaaaaaaccatacttttcctgaggatagtctggcagagtggatcatcattttaggccacacttgcatactcttttacttttcccattaggtataaacacagattttcaaaaatatacaagaaggccaggcacagtggctcatgcctgtaatcctagtgttttggaaggctgaggtgggtggatcacctgaggagaggagttcaagacaagcctggccaagatggtgaaaccccatctctaccaaaaatacaaaaatcagccgggcgtggtggtgggcacctataatcccagctctttgggaggctgaggcaggagaattgcttgtatccaggaggcggaggttgcagtgagctgagatcacaccattgcactccagcctgggtgacaagagtgaaactccatttcaaaaatatatatatatatgatatatatttatatataatatatattatatatgatatatatttatataatatatatgatatatgatatatatttatataatatatatgattgatatatatttatatataatatatatgatatatgatatatgatatatattatatattatatagatatatattatatatgatatatattatatattatatagatatatattatatatgatatattatatattatatatgatatatatttatatgtaatatatatgatatatgatatatgatatatatttatatgtaatatatatgatatatgatatatatttatatgtaatatatatgatatatgatatatatttatatgtaatatatatgatatatgatatatatttatatgtaatatatattatgtatatttatatatattatatattatatatttatacatatgtattatatattatatataatatatattatatataatatatattttatattatatattatatataatatatattttatattatatattatatataatatatattttatatatcatatatattataactatacattatatattatatatatttattatatattatatatcattatacattatatattatatatttatatattatatattattatatatttatatattatatatatttatattatatatttatatattatatatatttatattatattatatatatttatatattatatatttatatattatatatttatatattatatatatttattatatatttatatattatatatttatatattatatatatttatatatataatatatatttttatattatatattatatatttatatattatatattatacatttatatattatatattatatttatatattatatattatatatttatatattatatattatatatttatatattatatattatagatatttatatattatatattatatatttatatattatatatttatatattatatatatttatattatatatcaaatatatatcaaatatatatatcaaatatagctatctatatatatacacacacacatatatatacacatatacacacacacacacacacacacacacacacacacacacacatatatagaagaaaagcctggaaacaattcagatgtccgccatagggggactgactcaataaattatgatacatctgtacaatggagtacaatgtatctaataaaaagaagtgagaaatatttctctatactactatggtatgatttccacaatacaccactaagtcaacaaaacaaaaatcaaggtggaagaaactgtgcatagtgagctaccagttacctaggagcagaaggataaaccatgatattaaaaggaaagaaagtttgccactaagaggagggattgaataggttggtagctgaaggataaaagctagatttttaatacactttgtttttcgactttactattggactatataagtattttacatacttataagccaaaatgaaatttcaagaaaagcaatctctaaaaattgaaaataaaataaagcaaattaaccaaaccaggtatgcagctgatggcttaacgatacaaagagtaacaatcctaagcaacctaaaacacaataattttactgtataaaatcccttttaggatgtacccccaaaacacacacacatacacacacacacacacacacacacacagacaaatagaaaaaaaaagaaaaacaagtttaaaccatttctagtaatcatattgttgatggtagtattagcatattctgagaatgctgtgcattaacttaggatgaagcaaacatgcaattatgtgatattctaaatatatcatctgccatttcctgagaactacaattcacagcatggaagacagaagatgctcatgtacgtctgtcctctgaaaaggctcaaaagtaatgaccagctcagagaaatgaacacttctagagtcctgatcatagtcacaaaagtctatttctactaaacggaatcagagtttcctgcagaaacatatcagtctaggtctggaacagaaaatataccagacaagcctgtaaaatcttgtccaggatcacatcaaatatgtgtaaatccatgagttaagactatttttacaaatatatataattccgtgagttaagactatattttacaaagcaaattaaaacattaattggtcacaggtgaaaactgttaataagtcaacaatttctgaaaacaaatagaaagtaaaaatgaccactttcagaaggttgttctcaaagaaatatccaaattaataaataaaaagaaaatattagatcataattttgtaaccgttaataaattaatggatccaggtattgatcagcaacagctgctacattgacaaaaaagaaagcaaacagatattatgagcttcccaacagaaaacatacaatcacatatctgacgtagtcttgactcccccccaaaaaagtgaaactgaatctgatcaatttaaagtcaactaattaataagaaacaaaagaacatattaaactacaccaggggaatagtcagagggggaaactctccacaatttaataaccacgtttctttaataaattaatgaggagggaggaaggaaaaatagagagaggaagggatagagggaaaggaagaaagaaggaaggaaggaaagagagagagggagagagaaagaaacagagaaggagatttaagaattcttaaaagatgtattaactaattgcaatacaacacatgacccttatttggatcctgactcaaactgtataaaaagattataaaattatgtgatacaatttgaaatttgaacactgcttagatatttgaaattaaaaattcttagcatttttggtacaataatggttatatggttaggagttttaaaatcccctctttgtcttttagaaatatagatgataaaatataattcagagatgtatttcaaaataacacagaatagggaactgggtgggggtatgaataggtcaggattggccatgggctaatgaatgttggggctgagtgctaagtatttgggggttcagaataccatttttttaacttttgcctgtgtgaaattctgcataataaatgtattttttagaaaatgcaagatattcagtagcaatgagaacattcactacacagagcttggtttctaaatacaatttgctgctaaaaagtaccagagcttcttggagaaatggatgctttcaagtctgcagggagaaaattacaaagagagcctggaacatcttgtgctagaaactgaagaagcaattacggaagactgtgtcagccagtaagtgtagaaggaataatagaattttaaaatagccatttcttaagcaccaggttagttgttgtttcaggcaaagttacaaatggatggtgaaaccactgggcaataggctttattgacatataagatatttgcccagtctcaaggatgacaaattattattaattgcacataggaaaggtatctttttataatggggagatctagtgaacatctctccttagacaagttggtgaccaaacttctatcaccaataaagggaccatctgataccatgcatctcttctgatgatgcaatcgaaggcataaacatcctccatgcagtaaatgtggctaaaaatgtataacttgaatccagtcctgaggaaacaatcagaaaactgatttggactctttgataatattgaagaaaagcaggagactaacctagattcaagaaaaccaaacagacctgacaacaaatacagtatatgactcttgcttggaacccaaatgggagtggaaaagagagaagctataaagaacaatattgtgacaatcggggaagttttgatatgactgtatattaaatatgattatcacttcagcttaaatttcttaagaattaaactttaaaaaagtacatatagatagatatagaaaagaaaaagaggttataaaatattaataactgttgaattgatctatgaaggccaaatggtgtttgccatactattctttcaacttttccgtgggttctacatttttaaaataaaaagctgatgaaaaatatatcctgagccaggtgtgatggctcatccctgtaatcccaagactttgggaggctgaggtgggaggattgctggagcccaggagtttgagataagcctgggcaacgtagtgaggcctcatctttctctctgtctgtctgtctctctctctctctatatatatatatatgtgtgtgtgcgtgtgtgtgtatgtatatgtgtgtgtgtatatatatgtatatgtacatatatgtatatttataaagagtgtactacgtacaggtaatgtggcatcatcgcctttgctcttctggattttctccttggagctctctttctgattgagtgcttgctcggcaaatgatacctccaggttgatgtctgtttcaggggcaggcgtctcctcaggtgggatcagcttctcttcaccaacaaggttagatgcctcgtctaggggcccggggggaaagaacccaattcatatgctttatttattttttaaaaaaaattctaatgcattcgctacataaaaacatttgggaagagtactattttctctaggcaatacttagccgttattttaatactaaagagtatactcaagaatcctatcaatggtgcatgggaagtgggcagggagactgtggtgactagcaatccatagttcaattgtgcagtctttgagaccacaatcctcaaactgggttccaattccaaaacattgctggaagatagtaaacttttaataaaaaacctcaaaaggttttgaagtattaattgttgttttattctacactgagaaactaaaagcaaaaaaagaaggaggtgatgagcagtaatctcttgtaaagctagtaatttaccatttaattaatttcctctgagtggatcagtttcctggaataaacttcttccacaccctgcatttactttctggaatattacctacctatcatagtaaaaattccaaaacaagagttagtgccaaaaagtgatcactatgcgagtcaggtcaggacgtacctggtacaggaatggttgggtttgcacctgatcatgtcaaaaagtataaaagttcctacaactgtaaataccagtcaaataattttcacatatttacatcaagatttcaaggatatagtaagtttaactttgttttggcttttttggcttgttgttaaccctccagaaaggaatttacatttaaaaatctctttgctgaaaacaccaggtttaagctttggagaagatacttctaaatttgattatttggtaaattttttgttttaatgcaattaacagaaaaaaacctaaagccaagaaccaagattactgattttctcactgttgacctttgaatcatagtaagaagctctgaattacaaaatacatctatgcagtgtagacacatgcttataacaggctcacatacgaacacaacaaagtgatggaagctaaagttaatttaaaaatttaatagataaatgtcataaatacatatattaagagtctgcagttcagaaaaataatgtttatattcatttacattaaaaatgaaaatgcctgttttaatcaaaatcaagtttagaagtaaatatgaatctagtcttattcagtcccattcaatatgcagagtagacttcccaggcatgagacctgtgcagccacacagggctccaggctcaggagggttccacacttggtttaatgctctgctgttacatcctgaaatgtaaataagaggccctatatgtgcagtttgtccctgaccttgcaaattacacagctggtcctgatggaatctcacagttaagaaagtaagaatttacctgtgccaattccaaaactaagaatacatttaaagcccgttgatattattagtattcatctgctgccatgtatatttatgtttctcaacagcctgtgaccattttttaaattagaatacctataccttttgatgattaattttttaaagtatcaacatgaatatcaaagcacaactttaattttattttccctctggtttattctcttttatgttttactgtgactatgtacactggtttcctaggaaactattctaagaggaaaaaaatgattagccattttcttaaattagaagctacctttctagcagctgagtagttgtgggcaagaatttcaaaactactctttcttctcaccacctccatgtcagggttacaataaatacccccacactcacacccacaccaacggactatgccgaatgtaaagctgagtaattataattaaggtagtacacatttaacacacacatttccttcaaaagcaatgcaaaaaaaaaataccgcatatcaaagttctagttaaaatagaaaatcaagttgaagcacagcacagaaaaaaacagtttcagggttgaagaggggtactgctacaagaaatggatgattacttggctaataagtgatgttttaattacctactctcaataagaacagaatgctgagatcaaccttttggctcttaaggtcctaaaataaataaaatttctgtcatctagtctctttttaagtgcacaatagcactgggttacaaacattttgcaaatctcccttaagtttttcagttgtccaaaatatcctgaaatgccttaaaaaattttttttaaccacctgactttaagattcaattgcttctattttaaaaaaaaaaaaagatttttctttcctctgtagaaattcaaaagaaaataagaagctatacatatcaatataaaagtttaaaaaattattggggcattattaatatttctaaatgtattattaaatattgggcctttaatagagtttatgattgaatgaaaaatgaacatattacagtgaattaatttggaatgtgacaacccttgcaactataaaacttaacaaccttttcatttagaataagtatcattggcggaacatgtttaaaaactcaagtgtggggaaaacatttaaaagagactatgtcacccatgccttcaaattttaatcagaaacagccccacttttgaacctgagacaatgtttccatgcatttcatcctgaactttccaatgtttggcttacactggttaattcactggctagtgaaagagcatggcattgcccagaacaggtgcaatagggaatactcagtgacttggatggcatcacacattctcttgttattctgattggaggatctatgcccactatgtagcattccagcaaaagcagatgtaaatcaagcagcaagtttgtcacatttcacttgcctgctgcaagccaggcaggaaagtgctcacattatgaacttgtcttccagaacttttgttgatatagcctacatcatgatccctggcaagggaggaaaacaccaagaaaaggacaatgttttcctcagcatccattcaccaactgccagtcactcttccccagagcccaaaacatattgacattggcacaaaaaacccatctgtctctcctgatgacccagctctctagcaggcagggtagctatgccagcttgcttgccacttcagcatctgcaggtacatagatctgagaaaacacctagtgatttcattcagatataatgcatacaactgaagaaacatccacagaataataaaaagcaagtatttttataaatatatatgcatgtatatacatgtgcatgcatattatctttaaggcaggggtgccagagagaagttctgaggaaagtatggaaggaaaagatcccatatgatcttgagtaatgtaggatttttataggaatgttgggaacactcctcagtcctccacagtttacctaatacccctcccactactacttccaaaccaaatgcaacactattaatggcatgaacactccagttgctaaattttaggaacataaacttaaatcacctttgttttagtttgttaaataacaattaaggactacatttttaagcttaaatctattaacttcacttagaatattttccctttctgtaaacaaatgaaatagctataaattctctcttagtaagtactaataaagccttaatagtaacttttggctgggcatggtggctcacacctgtaatccctgcactttgggaggcccaggcaggcagatcatttgaggtcaggagttcaagaccagcctcgccaacatggtgaaaccctgtctctacttaaaaaaaaaaaaaaaaaaattagctgggcatggtggcacatgcctgtaatcccagctactgggaaggctgaggcaggaggatcacttgaatctgggaggcagaggttgcagtgagccaagacgacgccactgcactctagcctgggagacagagcaagactccacctcaaaaaaaaaaaaaaaaaagttactttcttccatacctcgagtttctaattcaaatctgaaataacaaatgttagcagagaaacatgaaaagtagaattataatcaattgcccataaaaatcttaactattttaaaaagttttcctacaatatctaaaaaattaccccatatatgaattaggagcttgtgatttaagaacgatgctgcaagtttgttggctcagggactagctgtgttgcattggaaagtggcttcacagctctaagcctcagttcactcatctgtaaaatgggttaagaacaataaccattacatggttttcaagtgtattaaatgaggtaaacatctcctgatagcatctggcacatgataagcactcaggaagatacgtatacgcattttgaatcagaaaataggaatacacattaaaagaaaattgaaggccagctatatgctcagcctcacataatgatccacttgagaccttacattaacattttaatagaatttgcttactagaattgaaggtaatgttttataagactgtaactgttatactaattaaagggcggaaaaaaaaaaaaacaagagaacaggttcaacataccatctcttccttggtatttgttttcatttgttctaagtgactgcgattcagtgccacctggagcctaaacatagaaaacaggccatttagtcatctccaactcaaaaccagagaaaatggtactgtaaataattttgttattaatctttagagtacaagacatgtactcagaattataacaatcacagtgaaaaaggggcactaagataataatcaacaagcaatcatccaaaaaatattttattacctacaacttgtaagagacaatagtaggcccagtgggaaatattaaaaaagtcacgagtgggtccctgtcatcaagaatgctactatggaggggaggagaaaggacaaacatgttaaaaaattagtagtagctattaattgacaaatggataagcaaaatgtggtctatctgtacagtggaatattatttggctataaacagaaatgaagtattgatacatgctgcaacataaagaaaccttgaaaatactatgctaagtgaaaggaaccagtcacaaagagccacatattctatgattccatttatagcaactgaccataatatgcaaaccacagagacacaaagctgactaatggtcacctaagagtagggagggaaagatggggaaggtctgttaatggatacaggctttcttttggagacaataaaaatgtgctaaaactgattgtagtgatagttgcacaactgtgagtatgctacaaaacactgaattgtgcactttaagtgggtgaattatatggtatgtgaattatatctcaatcatgctgttataaaactataaaagtacatgtccctaataaaacagaaattcttcaagttaaaaaaaaaaaagcaagaaataaatgtgagataagtaactaaattaccaaaccagcaataagacctaaaacatctgaaggaattcctgttttcaaggggtcggggcagtgacgcccaaggaacggggccttccaaaggtttatggagatggtaaaccatggccgactctgctcagcagtaaatgtggccagagagtacttcctcctttccaggtaaggcttcagaaggaattcagaggtcaggaagaagagtctggatcaaccacagaaagaggtctattcaaattattttaataatattgataattctactgtattttatctcagacagaaagtggccattgtagtctcaccacacatttcacctcaagctgttgtccacgaaggacttcatcctccacctgaagtctaaaaagagcctagaaaagcactaggctagggacgtctaggctattaatgcaccacttagagatggggaaaacccaggaaagtgttacagtgactaccaagtcacagaagtggtacgtgggtacccagcatcactttaatcccctgaagcacagagcagtcccattctccttccctcctcccacaagccggcagaggctggccctgcatggcacaatgagcagagtgattccagtctcacaaaagaacacatattttggagcatgtggtcggaattattttccttagcaattgaagatggcagtacagatggtgttcatttctgcattatatttcctagtgtcagcaaggccttcatgaggaagcatttaacatggaagagctgaatatacactcactcaaaagtagaagaactgcaagtgaagatggctggcccaagtttgcttgaggcatgggggagataaagcacttttctaatgggtggcagtgtttcaattaaaggcatgcagtgtaagcaagttaacattattttaatttccttttgctagttctctcttaatgactccatcagatgatacaatccaccaattaccttggactcaaaccatgtggttgtgacactgccagaaacttgctggaaaaatgttgtttctagcaccaagtagcaacatcctcttggagactggcagaaatcccacaatttatattttgcttaggctcagctctctattccctcccccttttcacttcctcttaactcccttagtgagggttctccaattgggaagaaaatgtcataatactaaatttccttaccattcatttttcttcagctggaaaccagtccagtcctttaacacaagtggatatcccaaataaccactgggtggtaagcaagtgcttaacttaagcaagtgcctggagcaatttaatgaccccaaaactcctgtaagatggactggacttgattcgaaattggtcatgcaaagagagtagcaatctgcagctagaagggctttcttgcaagaataaaatgtctacaaaaagcaaaagagtgtctacatgacaggaagataccttaaatataaaccctttcattccttttttaacataaataatcgttcaatttttgttatcttttatagtgtaaatagaatctcatattcaggatgcttaatgtcagaatcatgtacaaaatgcaaatataccaggatagagactggttaaaagcatgtacttcaaagtcaaacaaatttgggtttactatctacaggacactgagcaagttacttaaaatctggccaggtgcggtggctcacacctgtaatcccagcactttgggaggctgaggcaagcagatcacctgagatcaggagttcaagaccagcctggccaacatggcgagaccttgtctctactaaaagtacaaaaaattagctgggcatggtggcgtgcgcctgtagtcccagctactccgaggctgaggcaggagaattgcttgaacctgggagggggaggttgcagtgagccgagattgcactcaagccagaatgtaaatcaactttgacctcaagaacaccatctagatccgctgattttttaccttttttctggcagcaagacttttttgatgaaagaaacaaggatcatttatattctctgtaagctcctgatgcccttacaggtaagtaataggcaatccaccaactggcttatttgagtagcactgatctgagccacacagttcttgtactgttttgttgttgttgttgttgttgttgttttttgagatggagtctcactttgtcacccagcctggagtgcggtggcatgaacacagctcactgcagcctcgacctccagggctcaagcaatcctctggcctcagccccgcaagtagctgggtctacaggcacatgccaccgcacccagctaattcttgcgctttttgtagagattgggttttgctatgttgcccaggctggtctcgaactctccagtctcagcctcccaaagtgctgggataacagctgtgagccaccacacccagcctctcaaacttttatcatgccttctctgatacctcccttcattcatcaatcccacagtctctaccagaccccacagcttttattaacaagttaatcacctagacaaatatttactcaatcttttgtgtgctgtcactgtgctaaggctagacaccttaaagtttaacctaaagctgcctccttacatatcttccgttcatcctaaagggtttctctgtatatagtgaactctaacctaactggatgtgtaaacagactgtaacctacttgtgtcaatcaccaaattttgaccaatcaaaggtggccaactgttcaaaccatattcaaaaaaggcaaacacaaagctgtaaccaatctcgctgtttctgtacctcacttccattttctgtagatcactttcctttccctgtccataaatcttctttgaccacacggtagcactggagtctctctgaatgtgctgtgattctgggggctgcccaatttgcaaatcattctttacccaattaaattctgttaaatttaatttgtctaaggtctttcttttaacaccacaaaggagaagttacttcatgtctcaaagttcctgctttgtaattcagctgcaattagctccctcacattctacttcatccatccccaaaccagtctagggaaaaatcaaatattcctacaagcattaatagatagggaagaataccctaatcctacttttctctaagtaactgttggtagtcatgttgtctgagaagctgtccctgtcacccctagtggagttaaagtcacttgtaatgctccaaggacaccctcttctcctaatacatggattatcatgctgaattttaactagctttgttttctgccccatcagtataacttccagaaaggcaggaagcaagtctctcttgtttcctgcaagcatagagctttggtgcctggcatagaataggtgatcattacgtttttaatcatttgaattaaaccagattgatccaattaattgtaagcaattattcctttgccttaacatcaaaaaagaaaacctactgtttcttttgattctctctgttgagcaaatatgtctctgacgtcaggaatctggtactgtttgttttttttcctcaaggtctgggagaccgtctctactcgcttctgaactgctgctgcctgggtccgcgtcaatgttgataaaaacacaatgctttcctgtggatctccagcagactctccgaagagattggataaaccggcctctttaagccactcttcttccaattctccctctaagacagtagagaaaagtggtacttaaatcacaaaatataacaacctttacattttttaagctgttaaaaattcttactaaaactcttctattgtaaccaaaccacagtgctaagaatcattatctaaaacttggacaactgccatacactccagccacaatgacatcaaattttagattgatttcatatatactcaattaaaatttttaaatgacttcacatgtaattaacctctataacttccctgcagattaacccagaggatgatactgttccccttccagagataagcaaagaataaaaagataacttacttccatcaagttacagaaggaagtcaatgctggggctatatattaagcccagtttcttggcttaaattcagtactacctcagagtccaacactaatttatggaaagccttgttttctctgttcactgtagctgacaggaagtgcagcaaagaagttaacagcatcagaacattgggaactaatcaatttcaaattaatttttctaatcttccaagtcagcacatcagattatgtatttttacaatgtttttttaaaagcacaatatatccagcaaaaaaaacttatataggaagataatcaaacaacaatcaattcaaaacactgaaagcaggaaatattcatgcaaatattgtgtaagatctaatgaaagttatttaaaagcagaaggataattagaatggattctttccaaccatcatatttatagaggaaaataaaagcgatgaattgggacacaaaagacctggatctgtaccccatttctgcaacttgatagccaagtctctttggaaaagtcacttagcctcaagttgactctgttttctgatctgtaaactaaagcacacctccttccagctatgccataaccaaaggtgagaatgttatatggaaggagctttgaaaagccctgagatagactgtatcacatggtatagcacctagtcctacctgtctgtctttctatactatataaacttcttgacggcagaaatcaagtattaataactttgacttcaagagacataagccagtgctaggcactgtgcacaccagacaacaaaaacagtttactagcataaaaagtaagtcagcaaggccgggcatggtggctcaggcttgtaatcccagcactttgggaagctgaggtgggtggatcacttgaggtcaggagttcgagaccagcctggccaacatggtgaaaccccctctctacaaaaaatacaaaaattagctgggcatggtagtacatgcctgtaatcccagctactagggaggctgaggcaagagaatctcttgaacctgggaggcagaggttgcaatgaaccgagattgtgccactgtactccagcctgggcgacagagtgagactgtctcaaaaaaaaaaaaaaaaaaaaaacaaacaaaagtcagccattattatttatgcttttaaagtagaactcagtattggtgtataaaaccagattgccagaaaaaaaacctgatattgttacacaacaaggaaaataaacaagattactatgtagagtcattttttccattaaaaagtagaagtaaaacttaaacaatttaaagtctaagaaaaggtgtgggcatgtagaaaacattcccaatcttcttgatgatcacatagtgcataataatcaatgactctaattagtgttggagacttatcaaacagctaatgacatacttctatgtatcaggcttaaacgctgctttctcaaacatattctctccttattcagcagactagtatgctacttccatcttgaaacatggagaaagaaagggtgagagatactattaattatcacaaataagcttgactttattgctatcatatttgggaaacaatgagagaaaaataacaagaagttaaagaataagttaaccgtagtgtttttagatctaagaaattaaattaagaaaaaaccccaagtcttctttttaaattaatgttggtagatttttcaagcaatgtgtagccaaggaaaaaaatcttatttatatagattttgctagttaattagatcctaagtcatttagttaagaagtcattgtgttgagaaggaagtctctattagtggatcacaaagcactgattggggctctcacattttggcatttatacatcaacttatataaacatacttacaaatgtatagatggcacaaggcatagaaagaaagctaatacaacagacaagagaattggacatgaaaaacttagcaactgcttgaatttcagagattaaaagaaacggtacaaaaaaactttaaagttttacatgtttctcccagaatatcaaatattatagcagagaatgggaaatatggctggaaagtgactctacagaaattatgcaccaaatacaagaaagaagtaaatatggaagctaaaaacagtaatgccaccatctactgtccaactctatatttttagattagttggctaaacatgagccgttgcatccaatctggagaagtatactttgaatgacaaaatagccaggaccacaacaggtctttgaaaaccacccacaaaaattggtttatgtgaattttctttctagaaatgtcttggctaggaacaagataaatattctcaagtatatgaaaggctatcatgtaaaaatagaagagccttcttctgttcgtcccaaaggcataactacagcaagagagtcaaagttagaggacagcagattataaatcaataaaacaaagatcaaaagaactcaagctgactgaccactggaaaaacagtctcactgcaaagcagtgctctatcaccatctgcactcactagagaccaaatgacaatgtggctaccacatcacagaagaaatttaaagggaggttagatggtttcaaagatgaagtctaactctaaaaagctatgatacagtgagcttagccaacaacattccagccatatctatgactaagctaacttacttatgccacttgtatctggcagttgcatccataaatctgcctcaaacaagtatttttcaagttgaaaggcagtatctttttttggtggtcctagctttaattttttttttgttctcttcctttctatgcattcatttcctataaatacatatacaaacaacaaaagctttatttagttagttattaccatcaggctctttgacaacaaccacctcttgatcttcttggctgttttcactagatttcttgatgttttctagttctatccaatagtcttccatagatagttcatccaaagaatcctgggaaattgatcgatcaaatggaggcttctccataactttgatggtggtgctttcctggttcatagtgtactggccatatctgcgactgtaaattcaaaagaacccatggtttattttagtacaaaaggaagcagtataatttctaagacatcacagcaacaagctggagaatttattaactccttaagttatccttaataaaactaaaggaatatatattttggaacagtttactatggattataatatgcttgtagaataaacagtttcatgctccacagaaaagtatggggaagtacaaatagcaacatggtaaattatttttccatttacattaaatgaagactcatttttcaaatatattttttagcgacaaggtcttgctctgttgccaaggtttgagtgcaccaatgtgaccatagctcactttaattccaaattactgggctcaagtgatcttcccacctcagtctcctgaggagctactactacaggtatataccatattgcccagctaatttttttttttttggcagacatggggtcttgctgtgttgcccaggttggtctgaaactcctggcctcaaatgatcctcaactgatcctcccacctcaacctcccaaagcactgagattaaaggcatgagccaccacacccaggcataagactcatttaaacctgaaactttgtttttaaaaagcaacacattaaatcttgattacagactattaattgggaatgaattttatataattcttgtgtttatcatttatattcataaaccaaacttagtcaactcttatacagcaaatatcttcaaccgatgaagcactatttgaatttccattttatttttgaaatcaaaatataaataggatgatttaagtttgctgttataatctactgtagaaagaaatttctaatctttatttataaatggacccatgatttatatgtattaaaaattcaaaactggggtacaaactcatttattagcaattctgaatagcttggaattacctcaaacatttctctctcagatattatctatgaagaataaattgaataaataagagtatttgtataacttcaagtaaacaatgttttttgttataattcatatcttacctacttctaaaattgaattaaaggagcttataataaaaacctatatataataaaataattttttgttttattattatttatagagaagaccatgcccgattccttaaaagaagaaatttttcagctttgatgcctttcctttatatacggttgatatggtttggctatgtccccacccaaatctcatcttgaattgtagtacccataagccccatgagtcctggggggacccaacaggaggtaatttaatcatgggggcagttactttcatgctgttctcgtgatagtgagtgagttgtcatgagatctgatggtttcataaggggcttttccccttttggcttgttacttctccttgttgccatcatgtgaataagggtgtgtttgcctccctttctgccatgatttaagtttcctgaggcttccccagccatactgaactgtgagtcaattaaacctcttccctttacaaattacccagtctcaggtatgtctttacaagcagcgtgagaatggactaacaataaatttttttaaagaatacaatttgagtgaggacaatagttgaataactgttttgctattctaattttcagattgcttctctcaagaaggacttccaggaagtaattctttgtttgccagattggttttacttactgtacatattgaaaataattttaaaattacaacaaaataatagtgtgtgaacattcacatttaaactaacctttcccaaaattgtttaaaatagtaggattttaatagtacataagggagagggtcactaaactctgggcgaatctatccagcagcttaattccaactggttagaaaaaggcaaggaacttaattgtttattgctgcaaataaatgcagtataactgagcacttagctttaatatgctaataagccagttttattcctttaaagatgattcttcctgccttgattacaaactttattaatgctggttgcatacatgaataaacaatcactatactctctccccagtagcaaccttggggtggcgatgggtgggaattaggacaggggccaacaagcctaagtctagacatgtttgtgaatctctttccttaagtctccattgttcattgtttgccttcttcatcccttaattcaaggggtacttcctccttccctggcctcaatcgtcctgtttacatctctgtattccacctgggtccccatatccggccccaatggccactacatagccagtatttttcttgtagagttttcactcctgattcttaaattaacatgtaaatgagaaagtcatccctctcttaaaaataaaaaatatatatttttaaatttctggttcagcagctcaacttatctgtattgttcatattccttacttctgccttaccaggatagctaatgttaatttacagatgactgccagcttcatttttcgtattgcatgtcaaatagacagatgccttatccttttgttttctctctcatagtgtgaaattgaccaccttacttctgtctcctttaactcttacccccctgtgagaccacaataagtactgtaaactgtgtgaagtataatgactaacgccaaataattgggtttatctgctcaagggaaaaaggtgcagttgaactagaagtacattaagcctttcactcctgaaggaatgtgtttattctggcaagaattttccagtaaatttccattaagatagcatgtgcagaaaaatgcaaggtcattgagtaacaccattgttacataaatacaccatctatatcaagccttgctttcaaaacatgcataaagcaaaaattgaatagcttagtgctgatgaattgactcaatattttgactttaataagattcagaagctgaataggtttgtgataacctaaaaatactgagtcatggaaaagaggaattttctttttcttttgtctgtatttttttttgatcactggtaaatactgcaagaacacattttcatttttaaataagaggggatgaggagtgggaaggagacagccattcagtaatagactaccctccttggtcaacctgccacgtattttttaatttgtctaaaaatgtaagtgaacattccttcagtttacatcaatgaacatgttgtgttacttcttttctttgtagaatatattctacttttgtacttcagacaggcagtgactaaaagtctggaccttcctaaaactgttctgctaagaggccagttaactagtttcctcttttctgtttttaggagtatgttatatgatatcatgttcattctgcaaatggggttcaaaaacataaagcaacatctgctagatgtaatgaagtacagagcagaaatattttatatttccaaaagatccaagttgacacatggtgttgaaatcaaagaaacacacagtttataccacaggcaactaccagtgacccctccctgactttctagcaagcaattattccaagttccttcctcctccctctccctccagaattctgtgtgctaatcgtgccatggatatgcttcagaagctcccgcatttctcaccttttacaagtataatgacagaactagacgctgtcctctaaaggaagttgccagagttgctctataaagaatcgcttcctagcttgctgtacaagtcacgctctttccaatacaccagagtataatcattttgcctttttttaccatgaacactcacatcacaagcaaatattcactttacagatcctgatgggccttcctggaatcttcttttccatcttgctagcatgtcctccatgctctgtttacaaaaatgagggctttgttttgttgtattttcccaaggtatatgctatcccattttcccgtgatacattttccacctggtcagtgaatttcaaaggcactgatatcattcagggtatgagtaataatgcctgttatttattttgtcatagcaaatattaaactggtctgacattttttctttacaaagaggtgggggttgccattgattatactgaggtcagctagaagattgatgatttattctgctatcaatgcagtcagctcagtcagcaaaatgaaatggaaacatatggaactgggagtctaagtaccaaatgattccagctctacttaactgcaatctttggtaaatcactcactttctctactcctcacttttcctatctaaaaaatgggaagaataacaatggccttgcttgctttgtttgttgtgaaaattcttactgaagtgcctcataggtaaccatgaaaaaggtcccctaggtaaatttgtgctgtactaactgcccctcccactgtttaataaggtctagaggaatcacatatcctctagaatattctcaagctttgtggtctcaggactcctttacacacttaagattgttctaagaccctcaaagagctttggcttatgtaggcgatatctactgatatttataatattaaacgcagaaacaaaatattttaaatgctattcacttaagaataaacatcttcacatagataacattaaaaaggccatttttcaaataaaaatagtgagatgagtagcactgttttatatttttgaaactgcctttaatgtcaagcttaatagaagacatctggattcttacatctgcttctgcgttcaatcttttacaatattacagttcatgtcgtctctgggaaactccactgtattctcatgagagagtgagagtgaaagaggcaaataacatcttagcgttattatgaaaacagttttactctcctagacacctgaaagggtctggagagcctcaggtgttcccagaccacgctttgaaaaccactgttttaagaattctcaaaaacaacacataatgggtctgaaaatgcacgtttcaattctatgggcaaaactccagaaagccctctgagagaaacagacttgctttcctagtgactggacttatttctttgtttttgtttagttctgtatcttttcacaaaaactgggacttattccaatatatccatatttaatttatactataatgacaaagaattaaaatgtctttaaaaaaaacccctcccttgccaatactgttaatcatttgctggtgtccattatgtgtaaggggcagaagttctctctgggcatccccttttggccagtatatttgaaaattgccttaatgtgcctttgtcatccctaccctctacctaaaactccttcagggcagatttatttgtaagtaggatgtttcttctgagttcatatatttaactatctggtccaatttctaccttgtgttccctaccctgtttaaagtcctatcgtgatgctttctatccagtctgtctcctgcttctgacccttcgaggcatttttgtgccccaaagtcagctttcttgaagacctctgatcctagcacctgttttgttttgttttcttataagatcctttctaaaaacgatatactttctttcatgttccctatcccacttttatttccatgcaggacaagaagtgactgagttgggatatacatacagtataagacagaagaataaaatttatttttgttttggcttcgttctgttttaatgtgtaaaaaaaaaaaaggcagtggggtgggggttcttcctcagatcatgacatataaaccataatgactaagaatattttagaagaagccatatgtattgaagtgtaaacattagaatgctattgcacctcagagatttaaacctatcccattattttctagatgagataatgaggcctcaaggttaaatcttccccaattttacccagcaaaggggtgatagaatcgagattaatgccctcatttcttcttcagtggtcactttaatatgtcaaacagactaaaaaggataggatttactttgttttccccagatgcatcaatctttctgagtttgtattgcgtatagccaaggcaaaagtaatcttgttgacacagtctataatttgcactttcaaatgaccattacatttatcaagaaaaaaatacatttaaaaatcaaaccatatttttttaaaaaggatgagaattcttttccaatgcacttttttttttaatttttcaatttttttggttttttgagatggggtctcgctgtgtctcccaggctgaagtgcagtccacaatcatagctcactgcagcctcaagctcctgggctcaagcgatcctcccaacttagcctccctgagtaggtgggactacaggcacacaccacttcacctggctaactttttgtagagacagagtctccttgtattgccaaggctggtctggaactcctggcctcaggcaatcctcctgtcttagcctcccaaagtgttgggattacaggtgtaagccactgtgcctgtccagtgcactttctaaaatatggtttgtggccaggcacagtggcttacacttgtaatcccaccactttgggaggctgaggtgggaagagtgcttgagcccagaagttcaagaccagcctgggcaactaataagacacacatctctatttaaaaaaaaaaaattgtgtcatgctgggcataactttaaatattctgttttttaagaaactttgttttgtaaattttgaaattttaaaatttaatactgtgtctttacattatctctatgttagaaaaaaaaagcatgtttctcatgtgtagatttatctctttcatttcagcagcgatattaaagaactactgtaatcactatcatggtgagatggtaaagctattaatactgtgtaatggccttgtccatcagaatatgctgaatttgaatgactatgaagagctgcagcctacaaatgacccaagtcatttttaccccttcgaagagaatgcctactgttgtttagctgaaagcagtcattattagaagtggctctgacatccaggaagaaagaacactgataatgcctgaaggcagtaagaagttgattagaaagcaataccacatcactcgccccacacacacccatgcaaccatcagaacccagagaaagaatctaatctcttctatctgactcaaatgctatagtcttaaggatgtactgaatttcacagaaacttacttcttttcctctttgcatatcttacccttttcattttgggaaaaaaatgaaatttacttatttctttcagctttccttttctttaaaaataaaagtcgcggccaggtgcggtgactcacgcctgtaatcccagcacttcgggaggccgaggcgggcaaatcacgaggtcaggagattgagatcagcctggccaacagggcgaaacctcgtctctattaaaaatacaaaaattagctgggtgtagtggcgcacgcctgtagtcccagctactctggaggctgaggcaggagaattgctggaacccgggaggcagaggttgcagtgagccaagatcatgccactgcactccagcctggcaacagagcaagtctctgtctccaaaaaaaaaaaaaaaaaaaaaaaaagtcacttaacatcttgtatagtgctttatagtttttcagtgttcacccacttcttgctttgttttttgctactcacttttgacagtgggtagaaaagaaaaaaaaaaaatcctcagcagaacaataagcaaatgacctgattatcctgtttatgtcacattacctaagcaaaactgagaagacaagcccattaatgacactgttaagaactagctttggaaacttggctttatcacttctagagaaatatatgacacaaccaattcataggtgctgggttttttgtttgttatttatcgttgcggctttcactctacttcgtcttctttttttttgttttttttttttttggagacggagttccactcttgttgtccaggctgtagtgcaatggcgtgatctcggctcaccacaacctccacctcccgggttcaagttattctcctgcctcagtctcccgagtagctgggattacacacatgtgccaccacacctggctaattttttttttttttttgtatttttagtagagacagggtttctccatgttggtcaggctggtctcgaactcccgacctcaggtgatctgcccacctaggcctcccaaagtgctgagatcacaggcgtgagtcactgcaccttgcctcactctacttcttgacatcactaaaagaatagggacatagtaaccaccaccaggtcttgtagaaaaaagggagggaaggcctagaacgaaacgaatatgggaaaggcaggagacagccgaggcaggtttcaaaaattcacttcctttttagatacagacacaaggaacatatacgggaaaatagtagactatcactggccagacataggtttcttgctttagagctctggttctgggtagaagtgagatcttctttgttcctgagcttgccaaatctctcaggaagcagtttttcctcctccattggagatacaactcaacaagtagccaaatgggaacctaggattttaatgtcaaaatcatcttccaagacaaggatgaaggtatctgtagtgggactttgacataaaaatctcaggatcttggaacattagttcaaagcatatccacttcattctattatctgtcaccatgacttgcatccacctgataccctggacctgatgttctttctccaggaccctctatctttttcttgttctgcccagctgtagagccacctggaaattaaacaccagtagctaccttgcacttggagcataggctctccagtttgatctgttttccagctgtcattactcaatttcatatctcagtacctttctctgtggggctggaataagcttgcttctgcagcctccccgcattccttaccacatcctacgctgtgatgatctgcttgtgcgtgtgtccccaccattaaattatgtgttccttgggggcaagaatctatgtttcttttttcttttttttcctcttagtatccctggcttcgagcaaactgccatagcagatgttggtgaactgttcaattattaaagtactactgcctctaaaataatttctaaggcatttcttatttaattgcacaaaactacaaagaagtaagagagggatgaaaagcagatagtaaagaaatcagtcattaggaaactctaaaattaataaggtaaatgttctatgtctccatgatgttacttgtggatgtttagtctacaagtaggtttcctaaaggaaacagaaacatacaaaaggaagggctgtggttgcatatgagattgtaactaatattaaattacaaacaagtttcggctcagagtttttttaagcacacattccataattccattcatcactttaatctttaaaacaaataaatatttactgaatgccttactctctggttgggtgccttatcacagatgttgctttaaccaagctcttcaaacatttagtgtgaggtagatgacaaaagacaccagcaccagtgatgggtggaattttccagttcctcactgaactagtggcccagacaactctttccagcataggcctccaggtcatggcctttacttcaggattgtccctaacactcctcaggccctgcggtggttcaccattccttcttcagtaagaatttcatctcctctctgccactgttatccactcgttctccagtcatcccctgctcaattaattcctgagatttagaccaataatttgaggttaacatctatagctccttgctctggcctaaatgctacttattccccaccaaattcatatactgaaatcctaactctcaaggagatgctattagaaaaatggaacccttagggaggggattcatgctcttataaaggaggccccagatggcagcctcgcctcttccacaatgtgaaggacatggtgagaaggtgccatccgtgagaaagccagcccttccagacacccaatccaccagccctttgatcttgaactttccagtttctgaaactgtgagaaatacatttctgttgtttataggccacctagttgatggcattttgttacaacagcacagacagactgagacacccttcctggcatccctgcccctcccctggtctgtttctgaagttctccagggtttgcctgaagccccctcgcagtccattattaaagttgttctttcccaagatggaggccagcttcctcagaacaactgtctagtactcagttcttgtttcacagcaatcatgtagcttcagaggtagtgatcacatctaaatttttgtcaacctttacccattcatttttattgttctcgccaaatcaaattcttcaccttttcagtttcaaagctgtgctcctgtttcctttctgagaaatctatcaagtcctgaagacattttcagggatgaaatgaagaaagattcactagtgaagattaaaggtttttccacctcccctcatattcttgaactggtcattcaaaattcccccatcataatttctattagttcagaatctcatcactacagtttgccaacacaccttaaacatgcaatacagataaatttacgccaagatacaaattccctcacatataagacttaatatgcttcaagatctgggatccaagaaaagtatttaaatatcatccaggaatttcattctggctgctgactcactacagatttataaattataatgctctgatatcccttcagttcataaaaagttgctattgattcataatacctgtcatgaaataagcactaacaaaatacttgttgacataacacaaaattataaacaatgttttgaaatttaatgttagaatagtactgaatataatcgtggttttccttatttcctatagcaaatatattgcccttcagtaggactttcatataactttctatgctaataaaaacatcaacacaaggcaatggtgaatttaaaaaaaaatctgataataacgaaagctacatacacaccatattatgaaagagacatgggcattattattaaactcttctcagttctttgtgattatccactgcaataaggtagagaaatcatctcatatctcaatgagagtaggggagtataaaaccaacattccaccagccagcaaaagaaaaaacacagacaaacactggatgaaaatattaaaagtgaaaggagatttgtgtttatgttagaaaatataaatggagaagatatttataaagtaatgttggtaaatagtaatagaacaattaaaaacagcagcacttccgtggtaaatacctagataggaaaaaagaaaactgcttcctttatgctataactgtaattttatgagtagctcaaaatcaacttcaaacattacaatgctccactggtaagtatagaaggccgggaagtgtttttatatgcaaggtactaaaagtcagctctactagggggacagagaggatggagaaataacttccagccaagcaaataatttagccaagcttagaaacaattcatttatgttttctactaaatgtcttcagcagtcagtaacaaagtagaatatgtgaatactactacaaaacaatctttcttaagtgagattatctaaagccacttttttcttagcatgtttgaaatgctgagcccatgacagatgtgaatgcaagcagcctaaaagatacatgaaatataaaacaagaactaaagacaatttccacatgcaaaaagctacttgtgggttagggcagggaatttaaccttaacatttgaagaaaaaaaaaaaatccgactcaccagcctgggcaacatagtgagacattgtctctacaaaaaataaaacaattagccaggcacagtggcatgtgactgtagtcccagctactcaggaggctgaggtgagaggatcccttgagcccagaacttcaaggctacagtgagctatgatcatatcacagcccttcagcctgggtgacagagcgagaccctgtctggaaaaacatacacacacacacctcacaaaaacaagcattttcagtaaaagccactgagctttgtttagaggataggaacagagctcatagggcagtgaggcctaacatgaatatgagggacggacaaaggttttacaggaagggattgtgggaacctgaaaaaggtgaggggaggagaggtagacggtagagaaaaacacttttaataaggaaacacagttaatgccattcttgtgcaatgccacatcatctagcacaatatgggcatactgagctccagcaaatgccacccacagacacatcaaattctaggcggattaaaccccagaagctggaagtttatgaccctgtcctagcttaatttctgtcctgatccttaagaaatatctctactttccaacccttagtctcgggctcattaccaggcttacactagcctactgcttacctatttttcacatggagtagcaaaattcccacttaaccaaaagcaatatggcatcaggttccaaaatgtcattccctgtggggatctgaaacagctgaagaagagcgtaagtagttcatggcctcaagcgttgccccgctagctacagccaacgctgtcttggcactctatagaaagctgattctgtatcagtgtcccattcaaggacttccgcctctagtcttccatttccatccctctggttctcctctacttttcccatcgctacacacctggatcctcctctctgcccagttcctataaagaaatgatccaagttgactgatttctacttctccccaaaatgctgtctgctacatcactttcctgagccctaaattctgcaccggccaaggctcccaggacctcgactgaacctcagcagaggtctgagctacccatgcccctgcttgtcaggaaagagaggtggaagaaagaactgttgtgtcagaaatccatcacttcagaagagattagttaatgagctattgaacggaaaggagaggctcggccgggtgcggtggctcacgcctgtaagcccagcactttgggaggccaaggcgggcagatcacctgagctcaggagttcgagaccagcctgaccaacatggagaaaccccatctctactaaaatacaaaattagccaggtgtggtggtgcatgcctgtaatcccagctactcgggaggctgaggcaggagaattgcttgaacctgggagatggaggttgcggtgagctgagatcatgccattgcactccagcctgggtgacaagagcaaaactctctcaaaaaaaaaaaaaaaaaaaaaaaagaaaagaaaagaaaagaaaagaaaacagagcctgtagagaccataaagttataaaagatgatgaaaggattaagagcatgtaatatcctccagggcagaagtcagtatttatgctgtatcacagccatggaagccagtgtagatgacagcatcaaaaatagaacttcctttaccatcttgccagaataagtctacagaaagatcaaggttgtcagatactctaaggtaaagatcaaagacttagaactttttcttgttcttttttttttaactcaggtgtttgagggccaattgttaaaggctcttacctcatgaatgacttcagttatttgcaaaagccagttccgtaaagtaaaatgcagtttttataagacaaatattgttaaactctaaacaaactttcatacgccaaccaatctaatagagaaatgctaatttcttaatgcaatagttttatgaatacagttttactggacaatgcctacatttattcattggtcttctctcattacagatattaatcagaattatgcacttaggttttattataaaaatcattgcagttatggttttaaaaagaacttcacccacataatatacattttccatttcaagtaacacaggagacactgaaaaaaacagtgaaactggaatgaagtcaatgattcaatgttttgatggagtgatactatagaacttgagttcttgcttgttaataataaacagatcactaaagctgtgattcacacattcattcaacaactactgactccctattaattgcaaggcaactatacatgctgatgtttgaagtccaaagaagcacagggctttaccactgatctctgaatctacattttgatagaggagataaaatatgtagggaaacagtaatacagggcagcctggcttcacaccatatgagtgggacaaacaacaggtgttgcagtgctcactgctagttaaacataggcaaggacaagatgccaaaaagtgcttaaaaatgtcagtagcacagtaggccaggtgcggtggctcatgcctgtaatcccagcactttgggaggcccaggcggtggatcacgaggtcaggagttcaagaccagctaggccaatatggtgaaaccccgtctctactaaaaatacaaaagttagctgggcatggtggtacgcgcctataatcccagctacttgggaagctgaggcagaagaatcgcttgaagaacccgggaggcggaggttgcagtgagccgagatcgcaccactgcactccagcctgggcgacaaagcgagattccgtctcaaaaaaataataaaaaataaaaaataaaaaaaaatatcaatagcacagtaagaggaggtgagaagggagattccagtcttttgctatgcctcattttaatttaataaagctctcccagagccaacagtgtcttgtttgattcaattttatttccctctaacttaagcccatttcctctgagcaaataaagaagtaatcagtgtcctctttatattaatcccctcctgggaaaagtttaaggcagtcctttatcataccttgagttggccaatgagttttactcctttacttttttcccctgtattttaaaaagcaatgtcttataaatacaacctgaagtacacattcttattgacatccaaatcatgaagtacctacagataatagcatatcatctttgttctgaaatttttccattgggcctttttcagattggctcttactctgcaaatgaaagctccaagttgacattaattttataaacaggtacatatttaggcccaggtgggaagtccttggcacagataccaaagttaaaagcctaatcataaatgttttttgcttcctgaggaaattagcactgttattaattgctttccatggttcttgtttctttttaagaaaggctttgctgatcatttgcattaatattatgctaataaaaggggatagtaactagtttagtctcttcagtagtaactactgatcaaagagaggtaatttgcatgttttcttaattggagtgagctggcattttacacactcattgtcaccatttttgaaattaaaaaaaaaaaaaaaacaacttaatacatgttgggccagactggacaggagcaatttctccaatggaatcatctaaactcaagtatttcaagagacattttgcttctaagcatgaatcccaaatgacaaggatgagtattcaaacacagggcaaccatctgcatcgcaaaatacatttcagttcctctctgcagaaggaattcatttactgtggaaggccattcacttccacttctgagtgcttattcctcaaaaagcttccaagtactgtgagaacaatgattaaaagaggatctttccatctgtgctgcattaggctgcaacacagaccctcctgcagaaacagtttttgcataattcattatgccattttaaaccctaatcagtgaattgcaataagcgatggagtatgcatgacagaaaagagaccgacatttattagctgcctcctaagcattcacctaatccttactttgggctattgctccatgaatcatagtatacggtcactcatcttatctccaataggttcttattcccacctgaagtgttgtcatcatttttagcccatactaatgtttccagaaaaagtgtttcttacaccattatcactgtatagtgtgggaaggaactactactggaagagagaaggtggcatatcttcaggtctactgttcaccgtgtgagcatggctgatacatcctacaagaaacatcctacaaaaggaatgacaatatcttgtctcttctccttctaaaaaatcatatagcactaacttgttagtagtgatttttcacctataaagccataatttcacctgccactttgccttggaagtggcaagcaaggacctctctgggtcccaacttacacctcaaccacagaatctttgtcttgattttgttatttggagatctgtttaaggatgcactggaaaagaattttatgattacaaaaaaattaaaataaaattgccttaggcacctcaaatggaaaaaaaaaaaacataaaagtgatagaatccttaagctttaaacactgaaaaactgattaagcagaaggtatcaatgatggcatgcaatgtgtataattttaaatcagcaaaattagtgagaaactgtgtggacatcagggttgaggatgcagacaaatcttacgctaaaatttttcactttccatttctaatcccctaggtcatggtaaaaagaaaaacaatatattttgagttttctatttataggtaacagtaacatctgacatatgataaagttcttcagtttggtgattcagtaagaatcaagagaatcatctcaaaaacacaacttgaactgagttcactggtagagtcttcactgaaacaaatttaaagtcagtaactcataagaattgaaaacaactaaacatcactttatggaatcttaaaaagcacaattgtgggggtaatgggaaaccttccggaggtgcttcaaatatgagaaataaattgatattttagaacagtgctggccaatagaaataaaaggtgaggacgaaagttatttaatttttttttagtaactacatttacaaaagtgaaaagcagatcaaattaatgttaattttaacccacgcaatatacaccaaatatcatcactgcaacatgtaataaatatggcaattattaatgaaatcctttttattccattctatgtctttgaaatcctgcacataatttgcacttccatcataactaaatttggagcagacagtccaagtgttcaatgaccacaggttgctgatgactactgtcttgacagggtagctttagaatgaatgaggcagtaggcaggttctcctcgtagagcccagcagagacaattgctgtcattccttctcactgctaacatgtacaagttaatgcctgtttatctacaaaacatttattttctcattgactcagcaaatattcagagaaaacctactttattccacactatgccaaactgtggaacgcaggtgtacttcagacaagataggcctagaattttttttattttattttattttattttttattttgaggcagagtctcactgtcacccaggctggagtgcaatgacacaatctcggcttacttcaacctccacctcctgggttcaagtgattctcctgcctcagcctctgtagtagccaggattacaggcactcgccaccacaccctagctaatcttttttgtatttttagtagagatggggtttcggcatgtcggccaggctggtcttgaactcttggtctcccaaagtactgggattataggtgtgagccaccatgcccggcctgggcctagaatttagaaggcaacaaagacatgtgcaactccatatcctaagtggtaagtgctatggaagcacatattagggaagtcacaagctctagtgaagggatccgttgaaggctccacagaagagtgacatgagccggaggttgagtaggagtctaccaggtagaacgtgatgagaaaggccttcaaggcatggcaaccacacaagcaaagacagagtagcaagcatggacagtgggtttagagaaccgtgagtgcggtgatgtagacagactgcattcattttcagggaggtacaaccccctgggggagggagaaggcaccagatagggggttggggttggagggaataaggctgccgccaaatcctgcaggaccttgcttgtcaaattaagaaccctggaatgcaggcagtacgacaatggaaagtttttaaacaagcaaatgtcactatcaaattcctgttttagaaagataattctgagaaggcacatcctgagacagcctggggccaagatgctgtggcgtaaacagatcgctgagcgatgataaggtcctgaatccaaagggcattggtagaaacaaaagtgaaaggacacattcaagaagcttttcccaaagagaatgcctgggtgaccaattagataaagtagatgaaggaaacagaagaaacaaagatgattccacagtttgttcttggacaggagggtagatggcaaagtcattaactgagaaagtgaagataggaaaaaaaagagcaggtttggcagagaatgtgacaccctcagtttggacctgctgaatctgaggtatgttggagacccttgctacctaaatgtgctccacggaccagcggcaccaggcatcaagcttgccaaaaaggcagaatcttaggccccactccagatttgttggattcaaatctgcattttaacaaaatcccaaggtgacgcctgtgcacagtcaaaatagacaagaactgatctagacatctggaagtctaggttgtgcccatgaaagagttactggctggagataattttggaataattagcatatccatgagggttaaaatgataggagtgaaagagctcaacgaaaacaaatttaggatgaaagaatctgtgtgtggtgtgagggagtatgcatgtttggaattgaaataaagaatcatcataaaggtctacaatgactttcttgttaagtacattaaaaacggaaccaagaagaaaaggaagaggaggaggagaaaaagaggacacaaaacctttaaaaaaaaaaaaaaaaaccaaaagaatcacaatggtgaattaacattaaagctataaagaacttctttttatgattaagacaaactcgtattaatgttccttaatagtcagggatgctaggcaacaaaaatttgatacgagtggaagcagaaataaatggaaactataaaaaagaagtggaagcagccaggtgtggtggcacacacctgtagtcctagcttctggggaagctgacgcaggaagattgcatgagcctaggagttcaagtccagcctgtgcaagaatcttaaaaaaaaaaaaaaaaaaaaagtgggatacaaaatatggataatttgtttaataataatttgtaaaaaagttaatatatgggatgatgaatataaaaatattaacagtggtttgccttgataataggattatactttgttcattctactttactgtttctttccccctatttaataaatatccaccctttttctctttaaatgaaaaaaaaaaaaaagacactatttgctggggtgggggaatcagaaggcctggattcttggctagttttaccaagcagctaactgacttcaggcaagtcatttcacctctgcatgccacagtctcctccgctgtataatgaggggcttgagaacaagatgttctcttctaagaagatttccagctgtgactttctatgaaccaaattggcagcaaggtgagattcatgtgatgtctctaaactctcccttgacaacaccacaaataacgtgcagggtatccgttcggccctccaccctcagcccatcccagtctcttcatcccaccagctcacccagcgaacaattttcctggagttttgttcagaacccaacagctgtttagagctggtttcaagtccaccaagcagtcatctgtgtcctctgtttcccaggtgacactgttgtcactacctggtgttgccacacacacacacacacacagaacacaaagcccctgaaaccaagggcccctcccaagatccacgcaagctgcagctctctgaggcataatactctctgaaggctccatgctagatgccaaatgattaaaaaccattgtgcataattaccattccatgtaaaaagccttaaaatatatctttaatggttttactgcaggtcacagaagcaaaggcaggaatagcaagctgtgctcttttatgtgggaggatagcgcacatgaatacaaatatggcagaagatgaaagtacagcagacaaggacaggctgctctttcagcagtgacagcaacccagtgtgaagggcccatcagggcatggtgcctgcttctcagctccttggaacaaatactcagtgtaaacacactctctccttttgaagtgggtgcaatttgtctattgtcatcctcttgccttaaattatgctccactatggatctggagaggtgtttttgttcttctagtgcagaagtccttcacattagcccgtgaacactactaaagcagttcttctcctgtaatacatgcttccctctacagcaaagttgtagtcagatggcctccttcgagtgatactgaatgcccatgtgaagccttctttctgtttcactgtgcaaggattcacaagcatgaccttgtagccacaggcaaagttagctgtttggttaaaatcagggtacctacagctcacattgatacaagattcactgctctctatgccttaattaattggtactgcttaaatatagagaggcacattaggctaaactgaatgtgtaagtgaggaacagtactgattaagcctgccacctcttaattccaacacatctcaattcctaataagaaacttaaaagcctaaaatctgccagaaaaagagaattatcatgcatttgaaatgtaaatgttaattaaaattttattatttatgctgcccagttgcttcactgtaagaattaaatttaataatttgtcaggggcaattatcacaataacgagactaccaggcagttgtcattataaccccccattttaaggatgaggaaactgaggcttagagaaaatcaacatcgccaggaaggtgaagatgcaacccaggccatgtggccacaaaacccatgctcaagactctgtatgataaatgcctctgaaatctgtccccagcaagggtaacacaagctgtgacagggtttagagctgaaacgaccctagagatcactaagtccagtcattctcaacctatctaagcttcacagctgactcatctgaagaagagcagcaaatacactgtgattatcaatgtgctcaaagacatatgtgatagatacgaatgatccagtccctatcttgctctgacaacacaggctttttctttttttctagagatgaagataaaaaacaaggttcaagtctggtataaaatcctctgcatcctgtttcctacgccccaataattaagtccagtccttaattactcaaatgtgaatatggcagaacagaaaaattgggtgctttgcccagtaacatccaggtagttaatagctgcaccaaacatctaaaaaggtctcctgactcccagtcaggaaacagcataaccaagtatcctccattaggacagattgtatcgtgacagaggaaacacattactcttcaactttatcaccagggtaataaagacaggcaataaatactcttttattgttaattattttcactctgtgaactttgacagtccaacccactaatcttttggctaaagaacaattagccacaatgatagcacttcacatattctccaccatatccacacgtactgaaatctcctttggaaagagctgttcatactaagattttagcaatcgcaaactgaagtccaccagggtgacctggcagccagaagtgttttgtttggccagcagggtgtttcaaacatttttaaattggtttaccatgtttttttcttgtaacatgtttctctgagcaggcagcaggtgtggtggggctggcccctttgaacaggttatctacctcccagtttggcacagcccccaccaatcccatctgaaagctatgctatctatgggtccctgtgggcctctgggtttgcagcctctgctttactgcgttaatattatgggattaaaatggcatgactcattatctcgaacccatcaccaatgattggcatctgaattctgcaccaaatagggcttgctttatcaagacagcaataaacatagcaggggatggggagataggactgaactgatgaccaggtaggttgattgtggtccttcctttatcagtaaatagcagtattactttgatcaagtcacctaccctcaatggatcatggttatttcctcatttgtaaaataggaaagttagactggctacttaaggtttttttttttcaactttgaaatcccatgagatgtttcttacccaaattgtgtacaaatagaggaattttcccaggaatagagatgttagtaaagagtggaacctgagaaatgtggtgtcttaggagtcacctagactagaatttgcaacttggtttcatcattttccatgagatcaaaggcaagttatctaaaactctcagagcctcagtttcctcaccttcattcatttactcaagattgaagtaaatgaatttgagcatctactatgtatcagatacactctaaatgctggggatttagtagtgaacaaaacagtccgtggtctgatgaaacttacacattctagtggcaaggagacaaaaagtaaacacaaagatgtataaccagtcaggtggtgagaagtgctatgaaaataaattaggtgggttaagaggatgggtgggtagcagggagcagtttattatagatggaagagaagacctctctgatgacacttgagcagagacctgaatgaaatgggggaaggggatagcgggcagggagtttcagccatgcagatatccgggtatagactgttctaggtgaatagttattattgaaaatttgatgatgtgagaagcagaactctgacagagcctttagcactttttagaagtgtgataagttcctttcctcccacctcttcattccccactttccctcttctatgcctgtttgtctttaggatctactctctgcctttacatcagccccaaacacaatacagcaaagtagaacaagggtttaattccacattctaaccaatgacaatctacatctgtcaaatcctatttttaataatcaagtaaaaaggctggtgcagtggctcacgcctgtaatcccagcactttgggagcctgaggcgggtagatcgctttgagctcacaagttcgagaccagcatgggtaacatgatgaaaccccatctctactaaaaatacaaaaaaaaattagccaggtgtggtggtgcatgcctgtagtcacagctactcaggaggctgaggtgggaggatggcttgagcccaggaggcagtggttgcaatgagccaagatcgtgccactgccctccagcctgggcaatagagccagatcctgtctccaaaaaaataaataaataaataaaaaataatcaagtaagagagccaagtcttgcctccactatgttctgcgaaagaacctttcataataaaatgctctaaaatacaaacaggtagttaataacaacatagagcagagcagaagaggttaagatcacagtctccctatcagaaaagcctggatcatatcccagctttgtttgctgcctgcatgaccttgattaaattgcttaacctctctgaacctcggttttttcacctgtgaatgagagaccaataatgttacctcttttcagagttcaggagaaacttgaatgagatacgtacataaaacacatgcaattttcttggcacagaggaaagtgctcaatgatgtgcatctctttctatcaggacttttaattacaagctacagaaatcaactctgatatctttgcctgctgctagtctactggcaaaataaatacattaaaaatataaattaaaatagaaaaaaattaactctgatgaaaccaagcagaagagaattttattaaaagcttactaggtggctcccagaatgtccaaaagccaggaataatgcctcagatcacgccatggactgatccaggagcaccagggagcagcagatgatgatgctcacaccagcaatgcctgtagcaattgacactgccctctttttctgtggaaaagagggttattctgcctcccagcaaagctccgaaagtagagaactccccacaccagaatgagcgctcagatgctgggcagccaaaagaacggcaagtgtctagccacaccactaatgcaatacagtcctcctccctccatataatggggattggcttcagggctccctgtggataccaagccctgtggatgctcaagtcactgagttggccctctgtttctgtgggttcttattcacagggccaatggtatacagtatcctcatcaaaccacctttggagcacctactagttgctcatgctacttccgtcaccaagaatgcccctggccctctccacaccgttcagccacatcctggaggcccccactctgggatgccttcaacctgactccagggcctgcctccacccttccccagctacttctcttgcaaagtatcctattataaactgatttacatcctgactatacctgcacatacagacaccaatgcttcttagaagtagagatcaaaaacaagtgtatatacagttgtaaataccacatcctggtttactaaacatttctgtgtatatctcatcccacaaataaggttacaagtcttagttgattgggaacaccattcttttctcctgtacctgttaaaagctatttcctattctttgttgatgcttaatagcacttcctttaaatctgggatgaagcatagattttttatacagagggtcaaatgtctaattcatctacaaatactcctttgttaaaaaaaaattcaaagtcttatatggaatgagaaaagtaatcagtcaatattgtttcacaatattgaagcacttacaaattataatacattttcattttataaactcattttttttaatctaaagggagtaaaaatatcttcccactctgggaagtaggggaacctacactgccccaattttactaagaaaaaaatatatttttttttcccatggaataatatccccatcttgtgggcactgttgttcaatgttttcaaaaatcttagcaacatttttagaacagtgacatctcttaatacttctcagggatagatagaattgaactacaacccctatttggcccataagccaaaagttccctgtatctttaataaatgctttctgcacaaagcattcaaaaatttaatataatcaaaatctataatgagtcaggcatcaaccaggtctatatcaaaagaaaaatatatatgtgtgtgtgtgtgtgtgtgtgtgtgtgtgtgtgtgttgtgtatgtggatatatatgcatatatatctttagattcacgggtacctaaagagaattcctgccgtgaaaggattctctactcacatgagtaataaactcattcaggaaacatatattgagatccaaagtgtctagtaaggcattggctattcccttcaggtcaggatttgccaagcagaaggcaatacatacatggagggcaaggagaaactgacaagaaattcactggttcccagcaggctcttggccaaggacaggagtctgataatatctgcctgggctcttggccaagaggaggaaggttactgagcatttagaaatatgcatgcacaaaagaattgaaaatcaagaagggagaggagggttatgaaacaatgaaacaatggaaaagcaagggaagaaagcatcagtggtatctttttcatcaaaggaaaggaaagacatgcacatctatcaaaaggaagtaaaatggaagtgaggaaagaggctgacaatagtttccaactctttctccctctgtatgtcaaatgccccttggatatgcaagtaaatctgcaacttcaagataccatagatatgtaaagttccctagtcagctacctgccatccatttggaattatcgtgtaacaagcttatctggtcttgtttatattaatttccctcattcaaatagttcttctctagagataatgtttcccaagccaggacatgatataaacccactatttctggccatatttatttcagatgacctttttcattgaagaagggtatcagtgcatggagcacatgtgcaatataaatacagcatcctcaacccctagtccccaaaccatcaatttacccaaataatcacacacacacacacacacacacacacacacacacacagacacacacaccattaaaaacagtctatggactcagtacatttcaacatctccaaaatctcttttaaatctttctaaaccataagtcagtcccagggcagcctggtccatctggtcccgattcttcagcctgatgttcaagactctatgagctctgcccagcttttctccattcctcgtcgggttcctctcccacttctcccttcaagtcccccactatggccaaacagtaccagctgccggagcccaccaggcacttttcctaccccagaagccttgcctgtaccgtccccttctgtctgacaccctccacacttccctaacgcccacactgcagtgaacgtcctccactcgatctctaaacgtctaccatgttgtgcactgctcttctccaacactcactgaatgactccacaattatgatgagacccctttagtgatagtctgaggctgcagggagaattgcaggttttgaagtccaacaaccttgctgctgactggacacagaactctgggtataatatctaacctctttgaacacttgtttccttatttgtaaaatgaaagaacaatacctatcatcttgcatggctgttaagaggactagaaatattcacataaagggccaaataggactgcctcaactccagagaaataaaacaattacgcggtgtctgtaggacaggctgtgtgctcagtgaaaacagagccaggcactactctcctctgtggtctccgtactccaactgctgtgcttggcatctaacacgcacttttttttttttttcttgagacggagtctcgctctctcgcccaggctggagtgcaatggcgaggtcacggctcactgcaagctccgcctcccgggttcacgccattctcctgcctcagcctcccgagtagctgggactacaggcgcccgccaccatgccaggctaatttttttgtatttttagtagagacggggtttcaccatgttagccaggatggtctcgatctcctgatcttgtaatccgcccacctcggcttcccaaagtgctgggattacaggcgtgagccaccgcgcccggccctaacatgcactttttaaagtcaggaaaaataggccaggcgcggtggctcatgcctgtaatcccagcactttgggaggacaaggcgggctgatcacctgaggtcgggagttcaagaccagcctgaccaacacggagaaaccccgtctctattaaaaatacaaaattagctgggcatggtggcacatgcttgtaatcccagatacttgggaggctgaggcaggagaatcgcttgaacccaggaggcgaagtttgcagtgagccgagatcatgccactgcactccagcctggggaacaagagtgaaacgtctcaaaaaaaaaaataaataaattcaggaaaaataactaaaataatatagatcaaaatgttaatgaagctatattcaagcaatggttttataggcaatttattgttttatttgtacttttcagtattgccttaattttctagagtgaacaaatattataaaagttatgctaaatatattcactatgacaccataattttggcacactataatccctgttacacattgcaagtagaaattacatcaactttgtatctatttatctcttatactttgtataatttttctcctcaggcacttatgcttgcataaagctactttgctggactgaaataaagacagtttttattaaaattccccttaaattcaactccaaaacacctcctcagaattttatttgtgactacagtgtgtgctaatttggttatcaggttcaagctttctctggtctaaattcaacttttttaaaaaaggaaataaacctaagagagcttacattatcacttcatggatatctcattattttgacattcccactttcttatatggtaggtgtctacagtcacctggagttttagtattttaaatattcttcaatatattgtgcaaagttaacgaagtggaagatggagaaattctctatttcagaactgagtggcaacaatgtgcccattaaaatgaaaaggaagatcacatatcacaggtaacgtttttcctgcattctggtagagaatattcacaccgaggatggagggtggtaccctctcataatttaaaagcaaaacaaactgcctgaagagaaggctacgttggtggacagttaaattatttgaaaagtctcttataccacctacttcgcatcaaaaggagactcattcagattcaccaaaagtatgtgaagtcgtaactctttttttttttttttttactgcctccccccaccaagactttctcagcctactcccctcctctaggagctgccaaatcacaatgctctgctcccctattctcacctgctggcatcagcaggaacccagctccccgtcaagaccccctcaggttcctcccctccacacagatctctacttcctcaggccttcctggagtcccaagaagtagctgacttttacccaattcccaatctgatgtcagtttttaacacttcccagtactaagcccttcccaagatagaaaacctacctcttcaaatcataacatttgcagttacagtatcttagagatgtcaggagttagaagccatggacaccctctagttcagtggctgtcaaccttaacacacttgtctttaacctaatacctattttataatcttcacctttatgattctgaagtaaagttcaagtaatttatctatacataatcctgtgtgtatgcatatgccctttatgataatattaaggagaaataaaggaaaataatttaaaataggtttctcaatatgtgcctggacactaacagacataaaatgaagtggtcaactgtttattatatttacctatagaatgagttcacatttggaaaaaaataagatcagaaaacattctgcatgagaaatacaaaaattaaaaggataaagggacacgtgtgttcatcttcacaaatgaagatgtgaattagggccaggcgcagtggcttatgcctataacctcagtgctttgggaggctaaagtgggaagactgcttgagcctgggggttcaagatcagcctgggcaacaaagcaagacctcatctctataaaaaaaaattaaaaattacccaggtgcagtgatgtgagcctatagttctattaatagctactcgggaggctgaggtgggaggattgcttgagcccaggagctagaggctacagtgagctatgatcgtttacctgcactccagcctgggtaaacagagtaagactctgtctctaaaaataaaaaataaaaaacttgagttagattaagcagaggtgagactgacttgtacatgacatcttctcaggaatgccaaataggtcattctagacaccagacaattctttgtttggcaagtctgtcctgaaattgtagaatgtctaacacagctggaacctgccctgcaaatgatgggacaacataaaacacccccacaaattctcaaaataccctttagagggcactactgagaagtactgatctagttcaccccattttgcctctgagaacacagaagttcggagaggttaagtgattacaacactcacagcaggaacaggtcacaaaccatgacaaagtgggttccagaaaccagtctcatatcaccacccacacgtacacgcgcacacacacacgcttcctctcccctttcttctactcctggctcagatttttcatctatgtcctctgcaatcatcgccattcaaatttaaccgtctgtgtccctctgaccccacccatcccaggttcttctgaattgtgtgtgccaaccttactctccacggtacatcaagtctcactaatgtggccacaaccttggccttaactcagatcacaaagatctctaacttagcacagcctcctcactgtctctgggaccttccagttccatccctttatgtcagttccttccttcccactcccaactcagcacccaagagaactcattcagcattgctccctcaacattacccattatgtgtaacatgggtcttggttgacacccactgttggctttttccttagtccttactacacagaagtgtgacgtatattaagttccatatctacacaggcttgcaatacttcctactcaccaaacacagtacgattctattcagtgtagttctagttgtttaaacatttttttccaatggctgtccccagtatgctgagctaatgcctaattcaatcaacctataggaaacaactttgcttttataataattaggcaataaataatgaggatgctccttccaataatgtctttgttcatgctctatggctaagaagaatgccctctttctcaaaaaacatatttccttcaaaatctggttcttgttaatatcctcagtaaagctttcaagaccttagcacatattaatctctgaattctcaacttattaacaacgacagactttcagagaagaaagaaatctacagattacctagtcaagtcattttattttacagatggagaaactggaactcagagaagggagcaagcagtctccagtgatataaccagttgtctgcagagaaagctgaaacatgggtctctccacttcctgcccagtttcttttgaatacaccaatgactcatttcatagcatttacagacctttcaaaagatcagaattgtttttctttaaaaatatgcttctgcataaattttagaaagataagtctattatgcttcacaatgtccttcatctagtgcttaaaaatggaaatatttttgtttgctacgtattttcatactacatggaaattaatacaaatatccagttcctatttcccttgttaatttctttctcatttttttttccccaagtcaaaagccatctgcagcttgcttcccaggacaaaatagtcatgccaaaaaaaaaaaaaaagtcttaaatagagtagccaaatcaatgtcccaaatgaaggttaagttgtacagcattttggtttcaaaccaggtttattttaaaagtgttttttctctttataggaaggatagagtaaaggaaatcacatttctaagtgtgcctgcatgccttaactattagtcaacaatgattcatacatttttaagctcttatctgtctcaatgaaacttctcagatctcaactatttatatggtaaatgccttgaatgatcagaatgatcagattcaattatttctattcttttcatgcacttatttttaccatttgcttcttaaattaatgtacatcagttaactctttttaatggtatctgcagaaaagaccacagtcaaaaatccaaaataacaactcatttcaccaactttgaaaatctgatatttctattcttttaggttattttataatatattttaaatacaactgcaatgcagaaaaggaagtagatatattatctcaaatcttctaaactgagtgacaaaatagagaaagtttcaaaagtactggctcaaatttcactgccttaatctctaggcccacagagtaatacatacacacacacatacacacactcctcctctttgaaaaagatagaaactgatttgttttaagcttcttcccaactctacctctccccatcactaaggaaatatattttattatagtattttataaactgtcttaaaatttcaattaacaatttttatctacatgaaaagtattcattaaaattctcattattataaccacctggtattgaagaaacaagtgtaagatgttagcaaggaaggaggcacacaggaagatttgtaatacatgtccacaactttaaaaaagacaccataggctgcctgcctggttccatcattaattgtgaaatcttgaatgtcacttaatctttctggcctccttccttccttgaaaaccaagggagaatatgaacatggtatccgtttaaactttaaaattctatggttctaggacactacaaaaaatgtactgaattatttttctgtgacacgactgattaaacagcttatataaacagtcagctctccacgtccatgagttccacatctgtggattcagccaaccatggatcaaaaatattcaggaaaaataaatatcccacaaagttccaaagagcaaaacttaaatgtgctgtgcactgagtattatgttgaatctatgcaagtaaagtgatgtatgggtagtgtattaggtattataaataatctagagatgatctaaactatacaggaggatgtgcatatgttatactacaccattttatattgggaacttgagcatctgtgaattttggtgtcctcaggggttcctggaatcaatcccccatggataccaagtgaggactgtttatgtttagttagcccctcagcagaggccctccccaagagttaaattataaatccctgatgtttgtgacatcagttcgctatcacatattaagtgtggccaactgaatctatgattatttcacaaatttcatttttataaggtgtcgcctccattcttcattttaaaaattttgacaaaattgctaaagagcaaaacagccatgagggaacacaataataatgaaatgataccagcagcttacacttactgagctcttaccatctgccagcgactcttaaacatctgcacaggtatttttgcgtttactccttacaatcttgccattccaatgtgtcagttgagaaacagaaggacaagtggtgaaataacgtggccaatgtcacattgtaagtgggagatctggacttagaccccaggcaatccaccttcagttcactcaggtggctaaccccctcacctgggagtctctaattaagaggttgagtggcgggaggctgaggcaggagaatggcgggaacccgggaggcagagcttgcagtgaaccgagaccgcgccactgcactccagcctgggcaacagagcgagactccatctcaaaaaaaaaaaaaaaaaagaggttgagtggcaataggtggacgttagttcaatctcacactgatgagctacataaccctaacacccatttttcacatctgcaaggtgtgggcgggtgttggaggagccttcacattccattatctggcaatgtcatctggaaagcccacaaaagcatttaccacagacatctaaaaaagatggatacttctctctggaacatctcttgcagcacagccacctgccttttccctgcttagtataaatggacctaagagcaaggaaacagctgggttcccagccctaagacattatgagagagtatctcagagggaataagaaatagagacttaattgtttttccttgttcctagagatgcaggtaataaattcccctccatacgtccctatgtctacctgagctgtcaatcaaatagctaccatttttagaccaattcctacaccaagtttagccaagagccacttcactccaccgtactccaccccaccctcctccattcttgtccgcaattggaggagcaattgaatcacatgtaaggactgatcaataaggggccactgggtcattttaaatggcagctcttatttctgctcaatgtttaaaacagatccacccaaaaaacctggttggtgccattgcggccaggcacttgatccattatatcaagtgtcagactctgattctttcctggctatgttccagaagaggctactgaatggtaagaaaggtgggagagaatgaggagagctgctaactggccaagcttcctcacatcttatgcagttggtcagtattcctttaatagatgggaaagtagtaatctgtagcaaaagtagtcaatgtcttctaacgagggaaagtggtaaggactgttatttctgctttctaaccacccacaaaggttaaattaccctaatgagttgcagagggggggcaacaggtccaataacaccattagaacctacatcacagggtcagtctattcaagggggtttaaggtattcagaaactgaatcttcactagtatatgaaaccatcaaactgtccaaaaatcaactgtaggtggtttatgagccctcacacccctggcatctccacagttagagctcacatggaaaacattcctttcccatcctgaagatggaatggaaagactcaatctactcatggagcttaatattataccccttatagagcttcacttttaaatgttacaataatactctttaaagcgcctgcaaagtgtgatgcattgagcaagcactcactgcataacactcatcagggattctaggttctgttccttccatcaccagttagacacgagctccccaactagtcactttaccgctccaacctgcatttccttgggtgtggaaaaaaaaagttataccaaacgagactcaaagtcccttaaacacaaaaatctataactgcaaggtaaaagtaatatccttgaaaattatcaatcagtggtttatctgaaaacagatgaaaaattttttgtcctctttttttttttttttttttttttttttttttttaaggaaggaaaatagaggattccgggacagtaacaccgctgaatttttgtatcactaagcctagataagataaatggcaatgccagatctaaaacgtaaattcagggagactgtcagagtcctgtgccaaaggtcaagtttaaataaaaagttgcttatgttggccgggcgcggtggctcacgcctgtaatcccagcactttgggaggccgaagcaggcggatcacgaggtcaggaggatcgagaccaccctggctaacacggtgaaaccccgtctctactaaaattacaaaaaattagccaggtgcggtggcggacgcctgtagtctcagctactgaagaggctgaggcaggagaatggcgtgaacccgggaggcggagcttgcagtgagccgagatcgcaccactgcagtccggccctggcgaaagagcgagactccgtctcaaaaaaaaaaaaaaattgcttttgttgactaatatacctccatctacccttctttccttgttcataataattacactaacttatggttatgggtagctagttttagccagtttggtgcactctcactttcactgagtataccaatttaaagttctgactctagaagaaatgagacactgttttaaagcatttagattgtatctcttggttatatttgtgtgtgctattcaacaaactccaggaaatgtccttattgatgtttacagaacattcaatgaaagacgtaaaataacaatggctacactatttctcagaattctgttatcattaaggtaccttgaaaagctggttggctctttcccacacatccccaaccctcttgtcttttattatagcaacactgttcacaagtcacttcttcctatcatcatttttccttgtccttgcacagaaacctttgctcccaaacttcagcactcccaccactggctggtatttaagcttcccatacagcaataatattaccaccaaagctatgagtaattttaatgtgggaaagggaaaggaaatgcaagatagcaatacttgaaaggtaaaaaacaaaacttgcctatgagtatcatccatattttctttatcagctctgccttacatttctaccaaagtagaattgtccttgttgttgtcagataacagagagatgattacatgcacacaagttataccagctcagcctggggaaggtgcaaacttcaagtgtgtgttatttcacaccatgccccattgaaccccagaggtctgtaaggtaggcccttttgggtctccgatcaatatttacacaaaacatgaaataaaattcccccttacatctctgagcacatatctgaacttaaatgcattatggattagaaagttgcagttctctattgatctcttttccaaatccatgctgatacaacatttgtgctcaagaaaagctgtacaggcaaaaatattgctcaaacatatacaacacactcaacggatgcctggcaaagtgcaggagccgctggcatctgtacttatggagatatagcaaccaaatacattgtaatttggaaacaaaaccatgtaaaaggtatctgggggaaaattgtggaaattttaatatggccttcatattagaccataattatctttggtgtgataatggtacagtgcagtggttctcaaacttgcctgcacattagaatcacctgggagcttcaccaaaaacaaacaaacaaaaaatacgtatgcctgtgactcatgcagggattgagattaatttatctggagtgtgatctgagctttgtagtattaaatttttctaaatttaaaacttcaaatatagacataagatttacatgtattcattaacccattgtaaaaatttctaagtgcttaaatttttcaaaataaaaagttgaggaaacaatattaaccatcttgctcatgtgatcatcttagacaagatactatcttaggtacaaaattcagcatatcacaaacagaaaactactttcagatgataggaaatgtttaggaattcactaagtagcttaataaactgtagaataaactcttttggcttcaatgcttattttttaatgtttttaaaagttgaagtccagtgccttacttacattattctgaatatcaattgtctctatagaatactgtaggcataggatccatttgggttttatctctactgaccctaaaaacacactttaaagtacattttaaaataaatccttactattcatctgatttgtcctaatttgccactttctcttaagagatacaacaaaaatgttccaattaatattgattcttcaatcagtctaaactagtgccatctgtcatctggacagttattattcatagcaaaactgtagttattattcattatttatctatcaccaacttgatatttttccctggcaagaacataaaaagaatagggagaaacatagccggaaaagcagattggagtcctgatttctaaaatgttcatacttaagcatgtactcatttggaaaatatttattgagaacctactacatgccaagtaatgtggatacaattatacacaagccaaacacgatcccagatttatagttatgttgggaatacagacaaacacacatgacacgattagagggctgcttttggaaagttaatctgaccatcagaattcaactaagcctggcttgtagtaaaagctgatattacatgtaagtaaacaacagggtgttctttcatgaaaattaagtttggtggtagggtcctcctgaacaagttgctttccatttcgtttttatttctcttccctcctgcattggtttcatgtggctgctataacaaattaccaaaatttggtggcttaaaacaaatgaaatctattctctaaaagtctggagactagaaatttaaaagcaggatcactgggctgaaatcctggtgtcagcaaggcagcactccctccgaagcctctagggatccagtccttgcctcttccagtgtctatctggcagtaccagcatttccttgccgtggccacatgacttcaatctccgcctccatctttacatgcttctcctctgcatatcaaatctccctctgccacctaaaaggatacttgtaattgcatttaggacccaactggataatccaggataatttcccatctcaagatcttaacttaatcacatctgcaaagaccctttttccaaataagttcacattcacaacttctgtgaattaggacctttttaaaaatttttggaagccactatcagacaatcatacctacacagaaagcctaagaatgaaaaagggtaataagaaaaaaaatacaaatttactaagccagagcatttacagttctgctccaaacatatctgaagagtttttctgcttctgaataggtccccaaaagcaaggttctctactcctaagttatttaaggcgtttaaggtgagaatttaattaaattatactgggaagtaccatacaaattaaaactaatattatacctcttttctccccctctccttcctcctcaataataacctcaaatttcctttcgaacagctcctgtaacttttactgacccatttcagaactctggcttgacactgcactgtattaatcctgggagaaagagcccaagaaagctcagcaagcagccccctacacagggccagttctcaggagcctttaggatcagaggtaaatctgggcaaggccgaagcctggtctggtggtaccctggagccagatcgtttccagaactggaagagtaacatggcattcatccaggggacatgctccttatagttgcttttccttaactgaaaaaggaattcttggctagagagcctaaaagcctaaaggcaaaattatatggataacccagagagtatgtatggacctcagggctccaaggaaaacagtgaggaggcattatgactttgtacttcagcaatgacagcagtggaggatgggccaaatctctgccttcccgataaaccctttgagtagaactgtaacacagcccaccataatcctgactcgcctccttctctagtttcctggacatggagaattgctgccattctagaatccacttgccaagatccttaatcagaagttttttttgctgttgttgttgttttttgagacgaagtcttactctgttgcccaagctggagtgcagtagcacaatcgcggctcactgtaacctccacctcccgagttcaagtgattctcctgcctcagcctcctgagtagctgggactacaggcacgcactgccatgtccagctaatttttgtatttttggtagagacagggttttactatgttggccaggctcgtcttgaactcctaacctcgtgatccgcctgcctcggcctcccaaagtgctgggattacaggcgtgagccaccgcgcccagctagaagtatttcttaacattgttaatacttaacagtgtcctccaaaaaagaaaacatcctgaggtagaaaacctacatataaatcaataattcaatgactgcttgtatataagccccatctactttcttctctctccagatctgaattagtatacaaattcaatcttcagcctcttaagcaagaataaaaataccacatcatatactatgatgccattacaaatatattcccattttatttgagctattaacttttttttgcttgtataaacagaataaataattcatttcatggcttaaaacatagcaacatgaaggcaaatgcaaaataaatagcaaatcaaaatccgtgaaatactagacaagggttgtctgatgtagggtaagcactgtgagacagtccaaagacaacacattgcatttcactttgttttcaaagaacatggtgaccaagttcacaggttaggcaatccattatcccttcttcttcatttattggcttgccttcacctagcagaagtttcaggcagctacacaaaaagtctattgtttcctctctgctgtatctcatcaagtaatgtcctttcactccagtgaaaagcctatactcttactgagctcatcttagcttattaaatttataatttaacaactgtgccaacacactgtaattacagaatcattatgtggtttttacatacaattattttttaaaggaaggctcactggagattcagtttatgaaagcagatattacgtcaatccccttcatacatactgaagaaaagctccttcacctcctactacccaccctaacccccggttttggctaaaccaaggaaaggacaatattggtgtctgttaagtatgaagacatgccagggtcacagaagaaataactccagctttggaacataaaacaacccacgcctttctctttgccaagccagaatcctgacatgaccacttctgaagcccccttgcctcatttccccgtgttctgaggctagcttccctctctggcagacccccagaacaatacatgaggtcttacaggcaagtagtcctacagatccaagaggaatcaaagcatagctgtcacccacacaggatgcaaatggcatctcctcatggacaactgggtgccattatctgtagatggttactgaaacacagacttctgacattagtgttagtcgaattctaaagtttgatctggtaaaaataaactaaaaccctagagacacaaagcaacattcttatgtcccaaagcatcatcacataattagcaaacatttattgactgtccacagcctgcctggcattaactagatgttgagattcaggaataaagaaaacaacatgtttaatgccttgatgagtttatagtctaagatggatagagtaactggacacacagctgagaataaacaagggactgaacaataaaacacaataagaatttttttgagaaaactgcacacataatgcattttaatcaaggtaaaccatataatacattttaatcaaaagacatagcttgataatattactatattctattgattgttctatttctttctttctcgttctgtttctcctttctgtttttaccaccatggttattcacagacttatatacttcaggaaaaaaaaagtgagaaatgtgttttgttttttctttttttttttttgtttttttttttgttttttttgagacggagtctcgctgtgtcacccaggctggactgcagtggcgtgatctcggctcactgcaagctccacctcccaggttcacaccattctcctgcctcagcctcccgagtagctgggactacaggcactcgccaccacgcccggctaactttttgtatttttagtagagaccgggtttcaccatgttagccaggatggtctcgatatcctgacctcgtgatctgcccaattcagcctcccaaagtgctgggattacaggcgtgagccaccacgcccggccttgttttttcttttaatttgaggtggaaggaaccagcacagggttgttggtttttttatctgccaagtacgggctttttttcccgtagaaatgaaaaactatatctacttgcattagcttcatttcattaaaacattgatcacacgttaataatttgtgatcaaattcatttacgtataaacaaccaatatcagatcctttcatattttgattagcagtatgaattacagagcggaatgataacaagtcagagaagaaaaaagccctgatgagtcaaaaatgtaatggaaaatagaggttggagatggcaaaatctttccttatttcacaattttctctggggccagcccaatttacctttcacaacaatgcaataacaaagcagcaaggtgtatctctgccttgcacaaagtggatatggtgaatgagaacaccatcaagaatcataaaatgatgtgggcatacctggaaagtaacgtggaggtgtaaccacggcgggggggagttctgctaagaaaggaaaggtgagaaaacacttgggagaaaatggcttttgaaaatgtgaattgaaaagagaaggagctcaaagccaagaaactgacactgacagcgcgagatgattgaagtgcagattaggattgagttggggcgttgaaaaataaagtacagatctgaaaaatcttggagagaaaaaaataacaaagcttagtaagagctccttgagcaggcctggggagagagatgtcagtgatgactcagatgtcaggagtggcaaggcaggccagctgcaggactgccagtgacaggaggaagtaggagaggaaatgatgcatgcgatagctaagaaacactataaatggctacatatctgtggtttctccagcaaaaatgcatgtgcaaaacgttctgtattcagtaccctagttaaaatataactgtggggagagcaacagattaactacacaaactgttgctttaagatagcatgcctaggaatgtgcatgggaaaaaaatactgaggcaaaataaaattcaattgtggttagctctagagtagtattatattaataatataagtgacttttgcctcctcttttgtgctgctatttttctaaattttctctattgagaatgttgtcttgtagggcaaagttttgaaagttcctaagtgaacatgttagaatgctgtgtgttagtttgtaaatttcatggaaacacatacacaccagaacgcatccaccaacattaggtgtcatggagcctgcggcacacagagggtcctccaaaacagcattaatatatccgtagaagtccatgggaatcatcgtagttggccatctggtgactttcacgtgtttagcatataatcagaagtacacagattgaccatactttacccaaatcatgaaagccaagaaatttgtctaataaataaattacttaacccgaagcctaatactaccccaaggaatttttcagtaagatctgtgaaatgccctctagaatcagagaagatatcagcactaagatatttgagtattaaatacagtgtttcatgatcctagaaaagtggaatgggtacttccaaagtaaactgggcaaatccaatatgcaaggtcactgaaatagagaaacgtcattactgctttctcagactccggcggtggacactggacacagcgtagtaattaacaggacagcctctggaaccaggctgccagggtttcaaagcagctccaccacattcctagcatgtcaccttgagcaagttttcttcacttttgggcctcggtttccccaactataaaatagagaccataactatacctactctcatagaatcatgaaatatagggctgggcacagtggctcacatgtgtaatcccagtactttgggagaccgaggtgggcggatcaattgaggtcaagagttcaagaccagcctggccaacatggtaaaaactcatctctactaaaaatgcaaaaattagccaggcatggtggcaggcacctgtaatcccagctacttgggaggctgagctaggagaatcacttaaacctgggagccaggggttgcagtgagctgagatcacaccactgcactccaccctgggccaacagagcaagactccgtctaaaaaaaaaaaattgtgaaatataaatgagtcaatattcaaatataggatattataaagcacacaataccaggcaaattgaaggtactgtataaaggttattgttacatatttttcattaaaaagagatgtcaaaaaagcccagccttctcaaaaattctattcagacttaaatgcaaccattaaatgtgctgatcacggtgatcacttgatagttttttccatattcaaaaatacaaggcagcttttttttttcctctcccacttcctcttattttcccctctgatctacacacaaaaatgaatttagttaatacttgagttcccagaagtgagaagtccagatggttttctccctactcaagccctcctctaggaaacgaagaagtctttttgcaacaaccctgcctgtatgttggcaacaactttcaaaatcaaaagcaagttgaccccactgtaaaagaaaaatgcttcttcagcccttacattgccgggggcgggcggaggggcagaaaaatcagaaaagaaaaggaaaagtctgtgctaaaggaaaattaaataaatttgggtttttgcaaaagaccctaacaccgagctctcccgtgatgcagcacagcttctcggaacccaactcttactatttcctcggatcccctctctggataaaggttcttttcccagcagggccgttcatttgcatggtaagtaccaacatagtgtaaaatatgaactcccacgctcccaaaccctcctaccatggctgccctgtgttcctcagccactttctcctttgcactgtcccctacaggctgggctgctcatctcctagtgagcttgccttcccagccattcccataagactctctgcacattctacaagtgatgttcagggagcatctgaaagcttacctcacctccaaatctcaccaatcagaggagcctccagcctaccactccaccagtaagatatgaggatagaggttccctgcgcaggtaagctggcaaagaccagacgcttacccagagctgccttggctcctcacagggcaccgacttcttcaaagttcagtctcttccctaggatactgagaaagccacccacctggatattccagagaaatatgggctgaacttccagaatcctcagatttgcaactatagaagtgtttaagtgttacaagttataagttatatggatttgtctttctccagattgatatatttttcaggagtcaggggagtcatcccgtcatctttcactgaattccctccctaataaaacctttttttttttttttttttgagatggagtctcgctctcgtggcccaggccggtgtgcaatggcgcgatctcggatcactgcaacctccacctcctaggttcaagcgatcctcctgcctcagcctccggagtagttgggattacaggcaccggccaccacacctggctaatttttttttcttttttttttcttttttttttttttttttgtatttttgtagagacgaggtttcaccatgttggccaggctagtctcaaactcctaacctcaggttattcacacaactcagcctccgaaagctctgggattacaggcgtgagtcactgcgcctggccataaaaccattctttgcaagcacagtttcatccctttgagatgacagttggctacagatgttgaacaggtatgcagggaccagtttctatgcaccccacctttaggacttgcaactctagttcacgggtctcagagaagttgtaagttaccagtttccaacattccaaattactgcaaatgccagaaactacaaatgtttggaaatgccaagagtctgaggatctactgacacagcatatagctgaaacctcacccacatagtgttaagaaagcgtttcctgcctgtctggggctgacaaaccacaacaacccttttcttcttcctcaggcaccaagcaggactcatcaggacacctgggctcaggctcaaaccctatcaaagcagggctgtactgaggacgcaccttcattctcttcccagaacaagtgaaggaaataggagaggatctttgctctaggaaagcaggcttcagacaggaagtggcaacaattcatacaaggtgccattctttcctctaacccacaccttaacctgtgttgaccatctccctctctcatcacaatatctctagattcttccacatacttattgaaaactatgttcatgacacgacagaggaggtaactgtctcagatagcataagaagttcaatagtaaccaaacatttttttttaagttatttccagtgggcctgtgtgctttagctcacttaaatcttcacaacaccactgaggcacagagatgttttgtaactcacccacggtcagttaaccaataagggtagatctgagatacaaaaccatgccatctcgtcatcgagagctccctcttcccactacagtgtcaatccatcagaacagttccagttcagtagacccagtgatccatgatggagcaattgggtattctgaagagtgggcagttcacaagcagacatggatgaaaagaaatcccaattcttcagtcaagattgacctttaagactttccacaaagtggcctcaacctctcgttccagtcttttcttctcctccccaagagccacgtcagcatccttacatatcagctcccttccaaacttctctctcttcagaatgtatttacctttttcccctaaaacccaatcctatccaactgctccagcaagatgaaacctgaaactttctctgatcttcttagttggatgtaagacgtcattcttctgtaaacacctatagcaaggtttaaaaatgatgtaacattataataattataacttccagtcctgtaacacagatatgacagtgcttatcatccttagtagaaaacatgggatagtacataaagcacctgttaacaaactccaaggagttaccacagcacagtttttaaaaaacacgtcttatcagctgggtgccgtggctcatgcctgtagtcccagcactttgggaggccgaggcgggtggatcacctgaggtcaggagttcaagaccagcctgaccaacatggtgaaattctgtctctactaaaagtacaaaattagccaagcatggtggcacatgcctgtaatcccagctacttgggaggcttaggcaggagaatcacttgaacccaagaggcagaggttgcagtgagccgagatcgcaccattgccctccagcctgggcaacaagaatgaaactccaagtcaaaaaaaaaaaatatgccttatcattggtagctactacactggctaatgaaatccaaatatagctgctaccagtgacaatgattccatattttggagattcaatagactgatgctaagagcactgcatctaactattgtctaatataaaaacttctattttcttcctgtctccttgagaatctcaatgtcacagagccaacaagaggcaaattctaagtaattctttagcatgcaaaacgtatgtgctattactcttctttgtctggaatttattaaacaagcagaatcaagggagcaaatctgaaatttctggaggaataaatgggtgctgccactaatgatcatctctgaggccttgtcaggcatttgggaacaaacttaccagtctccagcctgaaagacaccaaggagaaacctgacagctgagaagctctgatttccctctcacatgaggataagagaaaccagcatgtattatttttttggttgcttggatggttttgttttttgtcttttttgagactaagtctcactctgtcacccaagctagagtgcagtagcgtgatctcggctcactgcaatctctgcctcccgggtcaagcaactctcctgcctccacctccagagtagcttggattatgggcatgcaccttcatgaacggctaatttttgtatttttggtagagacagggtttcaccatgttggccaagctggtctccaactcctagcctcaaatgatctgcccacctcagcctcccaaagtgctgaaatgggcatgtattgttttttaactaccccaagaaggagaaacaggcatacattgctgtgaatttgaaaacttcaccagagtactttcctcaagaatacaggaataagaatccacttaaacattataggttcgcattaaaatgccctttcagcataattgcaggaatccttgtgagtgtgtaagcagaatacatatatattgacacctttctgttcctctatttcatcactcagaaaaggcacgcatttgcttttcacagaaacctggaaaacagcattcctggaaaaacgattctttgtgtacctcccacactcctggcatccagccttcaaatttccattctgaattccaaaactacaaagaggtttggccatgtaagtaaacttgtcatctaatttctaaagaaggctgattcatttttaagtaattacatctatttaaattatgagtcttatgttaatcttatgttaataagcagacatataagcactttggccaaacagtccgtttataatgttttattcattacaaaatcaacataaatgttctgcccatgtaaacgtgtgtgtgtgtgtgtgtgtatgtggtgtgtgtgtaatgatttgtatggaaactgtaagtaaaaatgcaccaacaatgtattcataatacttatattatcttcacatacatgcagtgcctaaagtgtaaccgttcacaaaaatgaataaaaccactgctgaactaaatatatgtttatcagagagaaacctacaaatgctatgcttaagatagtgacaattaatatctgatgtggcttaaacaaaagtggtagattattaccctcatctcaagtcatcaattattacatacaacatataacttctccaaatgcaaaatgattcatgttgcaaatacaataaaacataacaattcagagactaaagagagttgattgtctacattactcacaagtacaattttagaatctatagataaggttcattttcaaacaaataatatttcatttactttttcccaatatgtaatgcaaataaaatattaaatactataaatattcactttgaagatattcaggattagaggatacatatcaataatacagcatatatagatttctagcatttcatattcctccccgtgaaaagaaaaacatttcatactataatttcaccagcttaataacgtatgtcacaatctagaagattcatgtgagaccaaataaattttatatgctttcacaatttcaaatattcacaatatttcacaacatctgaataaagcaaaatttatatgctttcaaagattttcttaaaatctttgaaattgaaaattcatttcaatgctatcattacttattcaatacaaactacctttgaattgtattttttaaatgctactcgaatgcaaaatcaccccataacaattgttttgcatctcaataatttatatattgggctcaatataagctgatcctttgagtaatacaatgcatgtaatattattgcacaaaatcctcacaattcaactggttattcaatcattaatttagtccactaatacaaatgagatggggaagaagcaggtagtatgtttatgggggaaggaaggaagtgaatgacccccaaacagtcacctccaacataaacacacactttccctaaccttatgccttgataaagactacacagactttggccccagttctcaccagcatggggcccttagaagcctagagaactccacttacagaaaaagaaaactagtactcgggggtgggaaaatattgaatcatgcagaaatgctttagcatctccatggaaagatctatcttaatctaaaaagaattctgtgcactttaacattttgctgagtaagcagttttttcctaataaaattcacttccaatcatttcttcaagatgcttagattattacgatttcaggtagaaatttgaagagtggctctctctaagcgttaaaacttactggccaagggttcacagaacaaagttttgtaagtgacattctgtattcgagcgctatcaattaaaattttttaaaagtatacctaaacaagtgcttctcgggccacctaaccaggaagcataatctcggaggtgtgaactacccaacaatggcaataaacaaaaggtctctggctgatactacattcacataattgtggaagtcctcacccacccactgcccaatctgttttctggttcccaaaaggcttctgaggggcaacatctactcctccctgcagccatgtgctccaggaagtgctatgtccatgcatctgacatccccgttcctgctcagcccacactggcttctccagtccttggctgttcttgcaagccacctccattgccaggagtgcctcaggcagtatcctctcaggggccacctgggcttggcctggggcttcctcagcactgacacagccagcacctctgcaaagtgacagaggaggagcaactgccctttccttccataattgttctcctcttccaggcccctgcccatttttctgttcctggccctgaaacccaaagaccccctctttctttgaatgacaacctctgggcctactggcctaagtcaaaggctgggcagcctgggcatttctgtggattttgttttcagtatcttgtgaaatgttttactctttacaaaatgcatgcttccttcctttcctctcctcaaaggcaggctgtccagggagttaagctcgcctgagcagacccttttctcaagaatattccatcatgcctgggtccccagtaacacagagttcattcatattttccttccctctccttgtcctccctgcactaggttggctgactttggaagatccctccatacaaaccatttgcctgggtacggagaaatgatatcatgtcaaggtggttaaacaggcacagaattttaggggataaatatgaaagcatacagacaaaaacatacagacatcacccacagaactctacagggaaaaggcagcatgggatggcatcctaggaaagcagcaacagtttgagtggacacagaattctatttttgccaagatttgtaatttgtggcagcaggacatttatgggaacatgtcatacagggacaccttggcctggaaatcatctatttataaaacaggtctaggtttaggaccaagaataaggcaatccccgtacctttggcttcctgagaactttcaaattacttcgcctaaaaatggagaagctcctcaaagagctgcagtgagttgatcacttggctaatatttataaaccaagaaaatccacatgctatgaaaaagatccatgactaaaagattattacaagtatattctctcccaccagccagccctcattcatcaccttctcaaatatccagtaatttaatcaaaggcacttttgaaccaccaaataggtcattttattttagaacctttgggtctgtggtaggccaagactttaatgtccttctgtccccctgaaatatataaatggctttactacatgaaaaagagctgttcatcggtaactgtgagaactccaagctgtttcacacccaaagagaattgtcacttggatttcagtggaaagttctcatgcaacagcaagggtactgaaacaatctagattgttggggaagacctggagataaggagactcacagtcatcttactatactatttctaaggttaagaagatctgattcttcatcttctaaagaaaaatacaaccattaatgccagcagtgatggtggtggtggcagtggtgttctcaaagcatatcttgtttctgtgtcatgctggttccggaagacttttaatgcatctatggagtttccagttttcaaatgattactaatggggagagaagaaggccccagcctagggctttctcttctgctctatctacaggaattcttacctcccccttggttcctgtggcccccactacagccatggcccaccccaaatgctgctaggaagagccagaccacagcctgccatagaaaatgtcctccctgtgaactgaggccccactgccactcagacacaggcacactgaagagagaaaaacaataactgcactgactgtacacctctcagtacaatgaaaatgactgaggttcaaaccaaagctgatctacatacaggtcatgtcatctgggaccagttatttcatgtacctgagttttaagatgaggataataattctcatcttatgaggattaaacaaattccatcttaaagtacttagaattagagagtgctcaatatatatttttcttttctgtgatgatacaatttgccccagttatacgaacagctgaccatgaaatgccagtcgacgtcaaggcggcacaaaattatttactaaatggcagaattttgtagaagtatttactacttcattgtagtaaatagcatcttggcgcctgaaagcagttaaggtgatttcccaaagtacctattttactaccagtgaattgcctagaatccagactggcataactttctccaaataccaaagggagtagagcttttattacaaaaacaaacacaaactaccagacaggcaaacattcccttgtacttttaacttgctctgtatacacttgaagaaatagcattcggttcacaaaagatagaaacaaaataatttttctgaatggcacattggtaaagaccctgacaacaaattgcctaggtctaaatctcagccgtgccaatagcagtgtgaccttgggcaagttactttacctctgtgcttctgtttcatcatcagtaaaatgaggataataccaccagcctgaatgggttgctatgaggattaaatgaggtaagatagcctctccaactcagtggcagtgatccttacctaaaaatcaattttctgcaagaaaacactgaaactgtgccacttttaagtggaaaaacttgtaacacatctaccaagatactcaaccagtttctaaaacatacacaacaaaactcccatgtcgaataaagaaactatcatgttggaatacaaaacgcttaaaatgctattaactgaagaccagttagtaagattatgagttgcttctaggcagtgacagtggcatatatcctcttagctgacactgtgtattgttttcaacatgtcacttgagatatttcccccacatttaggttaaaatgttttattgggtttgaagacataaatattaattttctctatagaagatattaagtaaaaaatgttttgctgaaagacttgtgttctatgaagcttaagtattaaaaagaaatattcttactatggaaatacattcaccaaggtggagattctgcaaagcttgtcaatatctgtaaagcatatggtagcaagcacaagaaagacagctacaaaaaattaacaactgcgactattacaaaaaagcctaaaatatctgactaattccaaaatgtacaatttttaacatttttctacatataaagcgacagccatgtttgggaatttcacaaattgtgctccctggaacaatggtaataactattctgaaaaaaaaaataatggcttctaggtcaaaaaaaatttggaatatgctacttgctacaaagtctctgcatctctcttttagagattcaaaatattcaccaggatattatatgttacaagaagtcctgcagtaaactatttttttttcccagaaactcatcgcttgctaactgcagtaaactttgtttacaccaaatattgaaccacaaaactctttttaatggaacacctgttaacagtgtccaacacacaattttgaaacagggatctaaacccaatttatggaagaaattttgctttaagtggattaacaaagtattagtctctcctgagatgtgtaaatagctataagaatgggcctttcattttaagagctgctaccctggactttgccttcaagcctcaggcttcaagctaagtttaaaaggggattagtctttttcctctccctgcaaaatggagatgacacaattttcaatctataacataggggatgggaaaattagtgaaggtttatttccctaaattacactaaaatcttagcaattcagtgatctgacaaagcatcccatcatttctacagacaaatgatttaaatttatgcattaagtccccacaaaaacagtggcagtcctaagctgaagatacaaagtattttaaagaaatataaacgtgttcttatctgaaagtactgttaaaagaaagttccctcatttaagggaaaaacattgtccaccacccgccccacccacctacagctcagagggcttcctagtcacgtatcctctccctttctttgaagtgtggcaaaaagcaaatagattttagtaataagtatagtgaggtgaaagtttctaaaaaagaaagaaaggaaatcctacactgatgctatttaagtatgtgaagtctcaatgataacagttattagatgactgctaaatgtaactactgtactgggattagaaaaaccaagtaacttaaatactggcaattaatttttgtatagcctctgggatgtttttcacaggtaacatgtgatctcaaaaaaatagtactctaaaatactgcatctgtgtcccatagtcccttagagtaaatatcactggatgtaaacaaacaagggcctttggcaacttggctgccaacaaatgaaggcagcagcttaatttattacactacacagaataatagctaactaacatttcacaagaacttcctatagaccctgttaggtactttaaaagagtgtctcgtttctcagtactctattcttcccaaattcaaactggcatttgtgtctaaaatctaaatttacatactttttggaaaacatttttgagaatcaagcataatttttagcaggggaaaaaaagactgtataataaagtgtcctgcaaacaataaatacccaatccttcgaaaatatcaagtatcaatcaattcacaaatattgttgagttctattatatatggggaattgaatctatatagtgcttaggataaagaataataccgggcccctgcatgaggcatttatgttcgtgatgaacgaaaagattatccaatataaagttaccaacaaagcaaggctaagagataaatgcacataggatacgcatttatatacagatggagattttaaagtcaagctccagggtaaggggattctgtataagagaagcaagcaagaagatcaggaaaggcaggtaaggccagatacaaagagactagaatgacatctgggtagcttttcaccaaagataaccacaatcaactccttcccctccctctgtgtgcaagccattccctcattgagaagtgtatcctattcctccatcctctcgaatctaggttggcctatgattaattggccaatagaacacagccaagtgacaatgagtaacttctgaggtcatgagaagcctggtagcttcctcctggacttctcgaaatcctcgctctggggtaaacctgcaagaatgtcagaagtctgattacctggctactgctgtactctcagggagcccaagccatccagaaaatgcaggaggagaaatgcaggagataaccaaccagcacaagtgccaaacaaaggtgtacatgaagaaggctctgacgaccccatcttgcatgataaagcccaagaaagaacttgattgtgatcctccagaatcagaaaagaaaactggtatttttagcccctaagttttggaatggtatgtttcacagaaacagacaactgaaaccaccaccttctccttcaggataggggtcacacactggtagtgcctgggtcagatccatcctgcagatgggatttttttttttttttagtcagtattttggaaattctagctaacattttctaccaaaacccacatttttctgaggcctgcaatttctagtcatccacttcattcatttactacctgtcaggcctctattgattcttctgtaaataaaccttgttctaagaaaataacaggagacaaaggattaataatgcacttatacaattgcctaaatatatccagtgtgatgacactgtgtgattacactataatagaaaataattcagaaatgctgtaattccaaagaaattcagtctggaaacattaaaatacatccccattttcaataataaataaaaaattaacaaccaataatttatctttaaaaaagacactatatacatttattcctaagttcacctaaaaatattccatcagatgatataccataactttgtattatttggacaatgagaaataacaggcacacacttagtaaccttagtaaaaacattaattatagaatacgttgatcgagttacatgtttctagcccacctataaatagcctgagttgctttcaactttcagttaccaacttaccttttcttactcaaacttaatctcaattactcaactacaaattctttgaaagttttattcctcaaaagaaagaaccatgcaagacttcctaaatatgatactaaaaaagttgttttagaacccaattgagatgcactgcaaactccttcagagcaggaatttgtacacttatttttttctaggcttatcatttgtacctagcaaagaccttcactgttgtttaaacatgtattcattttcaaaaaataatttaaaatttaagatatcccatgtttacatgtccttaaagcctttctgagttacccaaatctctaaatatgattttaattttatgctgttcaatcaataattcctattattttcctcaaatatagatggtatctgacagtcattagcattcagaaataagccagatctctacagccaaaccaccaaaatttcaaaattcttgttagtgtgaattgcaagatttttctacagaattctaattttatagcagcatggtgttaaagcacttttttttttttttttgggttgggaggggaacgtagtcttgctctttcacccaggctggagtgcagtaacgagatcttggctaactgcaacctccatttcagggttcaagccattctcctgcctcagcctcccgagtagcgtgtaccaccacgcccagttttttttttttttttttttgagacggagttttgttcttgtcacccaagctggagtgcaatggcaatctcggctcactgcaacctccgcctaatgggttcaagtaattctcctgcctcagcctcccgagtagctgggattacaggcatgcaccaccatgccagactaatttttttatttttagtagagacggggtttcgccacgttggccaggctggtcttgaatcactgacctcaggtgatccacccaccttggcatcccaaagtgctgggattacaggcatgagccacacgcccggcctaaggcctggctaatttttgtatttttagtagagatagggtttcaccatattggccaggctggtctcgaactcctgaccttgcaatccaccaacctcggcctcccaaagtgctgggattcacaggcatgagccaccacacccagccgaagcacttcttactttactaaattaattacattatacagctataatctgattcatctaaagtcacaagaatgtatgtcattttccaccttcctaaatactcccaaatcaatgacaaatgtagacaagtacataatccctaatagaagacaggcacatgtttaggagacaaaggcatatttattggagtatacaaagctcccaggtgcctggggaaggacattgtactaaagtaagataaaactagaagcagaaaaaaatcagaacttttacatctcagatcacaaaagtctggagaggcaacaaagaaacaacagaaacccccaacttagttgaagattttatttgggttggaaaagtttatttccaaacctgtagttgggaacttggaatccattttcctacagcaatggtgctacaaataaatgctgttttaagttttctggctagtaaaaagaaattaatccataatatggtagaattatagaatgaatatctccatggaatttaaatatcatttttgctatttctcccctaggaaaaatggcttctgcatttctaattgcatacagctctatcctcccctctacttcatcctttcgctagttacgtccacacccaccaaaaaagtccccagtctcttagaggtggaagcaaagcagcctgcttttatgagccttttgtaagcaggaactactgtgttgataagaacttgaaatgcaagtgtagggaggaactggagaactgactaggaggacatagcttcctagcctacagcctggagcatgtaagcaagtttattatgtattctatagatgaggagaaagactaacagtacagttttcaaatttttgtactaaatgggaaggagatggggcacagagcttaagaagaactgggtgaagggaacacatcccccagatctctgccacagatatacattcagctgaactctgccccatgaaacatcacttcttggttatgagaacagcctaatcaagaacagctgttttatataaataaattttaagggcacaaatgtataacaattattcttttctcaaatacttagctataatgatacattggtacttttacctgcaagtattgagataacctaaagtcaatttgctctttgaggaacaggtgcaaataacttttccttgctctacactagatgattttccatcttattaagagtaacaaacactctgcaactttatagctacccaaactgaagcattaaaggtattcaaaacagtcacctgggcctaacaagagttcaatacctttaaacacttttttagggtactttttggatattaaatgtagtattgaaataatgtgagctatttatataacttatcccactattagttttaaaataaaggcattatactgcatatgcattagaagcaaacattcatttcccaaatgacttacaaattaatcacaacaatgctttcctatactatttccaaattaattcaccaacaggtaacagtctgactgccctttatcatcatcgaaaacacgtactttatgtcaagcactcatgtaagtatgttacatatgttgactcagtcaatccttaaaataagtcttgagttaggtattattattcccagtgtgcagaaggaaacaaaaaaattgaggccctgaaacattaaatagcccagagtcacaagctgctacatgaaagaagcaggacttcaacccaggcaatctagctccaaaatctgtgtatgcaatcactacgcctcctcccacttacactcattcattcattcaatcttttagtaactacctaaagtgaactaagcactttgccaaggcttaggtataaaggaacacccctcccttaaaaaaaaaaaaaagacaggcaaagttctcaccctcaatgaacttacatctgagtatataataaaaaagtaaaattcaaattaaactcaaaagtttactatgacaactctggttaagtgaaatgaagtgaaatgtctggggaaattttaagatactgtacagaaaaggatttagtaataatgttcatctgcataattttttaacattctcaaacgttacacatttgatcttcatgattaactttgcgaagcaggaagggcatcattacacgatatgatttcataaatgaggaaacagataaatgtgtcatgtcctaaatatcttagcaaagatgccacatcctttgtccaggaatctcactacccacagaccctgcttttctaaaaagatccagaacaagccagatcataagctgcctggggttgtactatggcctgttcaaaaagattaactggaaaaatctgatgtcctttcaaaaatgtgaaattaaggccgggcgcggtggctcacgcctataatccccacactttgggaggctgaggtgggcagatcgtgaggtcaggagttcgagaacagcctgactaacatggtgaaaccccatctctactaaaaatacaaaaattagccaggcgtagtggcaggtgcctgtaatctcagctactcaggaggctgaggcaggagaatcacttgaacctgggaggtggaggttgcagtgggctgagatcatgccactgcactccagcctgggtgacagagcgagattccatctcaaataaaaaaaaacaaaaaacaaaaaactgaaattaggaaataaagagatgggtcagttagctatgaaatgtaagatgactcaggaggtaaccaggctgggcatccatcaggagccaaaagctcaagctgaaatgatgagattagaaagccagtgggtagaaaagaattgagagtctccaagagaacagaaatgccatgagtgtccccatatgaccagctgctgagggaagaagagatgcctcctttccctatgacccagatccctgtaacaaacctcatttcccataaggaaacctcagtgttctttgcagccaaaaggcaactaccaaatgcatatgaaaaggagatgaggtttcatactctctttcaacacagaaattcagatacttagtggacttaagtatggaaaaaaactacaggtagtaactggtcacacgggtctccatggtttctgtttatttcttgcaaaaaaaaggataaacttggccagctcacagcaacaaacatggaagtcaaaagaatgtgccttcagaaagatctagacatcccttccgttcctcctgccctaatccatgcccaataccctgactcatccccactctcctcaaataatgagagttcttattctctatcccttttttatcgaaagaaaatagaaaagcccattaaatatcaactgaataaaacatttagaacaaaccatctctctcaaaatattcgtatgaaatgaaagggtgggcacaggacagagggcacctacagcagggttcaggagaggattgttgtcatacctggtctagcaaccccaaacctacagagtgatccatgctgttagtgactcccactgagacccacagcctacaggcctcatcacagtgacaccactaggatgatgacagagctttctcagggctcttggacagaacagaatcaagaagaggcaggagggccaggcacagtggctcacgcctgtaatcccagcactttgggaggcctaggcgggtggatcacctgaggtcaggagttcgagaccagcctggccaacatggcaaaaccccgtctctactgaaaacacaaaaattagacgggtgtggtggcgcacgcctgtaatcccagctactggggaagctaaggcaggagaattgcttcaacccaggagacagaaattgcagtgagccgagattgcgccatgcactgcagcctggtgacagagcgagactccatctccaaaacaaaaaaaaaaagaagaagaaaaagaggcaggagaaagaagacagccacagggcatggacctcacagattcatgagcaaggagtagagggaactatccctgtggccagggacagccttggcctctagggtgctgggttctttttctaatttgtgagacagatgtttacagccagtggggaattaaaacagaagagtgaaacagataatttgttctggcaatgagtccaattatcaaaaacgagttaagcctaacacccatgcagtccagtagcaatcatgtgcatcattaaatgcatcaattgttacgagtctttattgcttcaacacttgtagaagtatgataaataataacagaactcaaaatattagaaaattcataaaatatgaaagcaagccccacttagaagagacaaggcagcacagtgcaatcgtacaatgcagaagtaataaatgtgccgtggacaacaaagcaaatgttcaacaagtttctctaggaaggtgtgggtggggatggttctgataatctctaaatccttatattcgaaaggcataaacttaattaaaagttctatgaagataatataactttaataggcccacaaaaatcacaggtctcgtcaatgagaggaatcaaaaggcaaatatcacatgtctgtgaatgaacctaagacttccccagttggacaccgggtgcaacctctaataattcaagaagaaactatggatagggtttttaaaccacagtgaagaaaatgcctttacaaaggactcttatgtcatgaaattgaagaagagattgatctggaaaacaattatccccatggacaggtttaaatccatttagtcactaaattctatgaaattagaatgaggaaatacgctttagaagctaaggttagaaaaaataaaatttaaatattacacaattgcattataaaaactcattaccatccctttttttcaacaacaaaaaaatatatatatatgatcaggtaataatacactaattcagaatgaagaaactttttaaatggtatactacataggtttttaaaatcctgtgaagattcatgtaaaaacactgaactaatcaagacagccagccatgttcttactttaatgtttatctcaaaaagatatttctcaaaactgagcttcaggccaggcgtgagggctcacacctataatcctagcactctgggagggcgaggcaggcggatcacttgaggtcaggagttcaagaccagcctggccaacatggtgaaaccccatcttcactaaatatacaaaaattagccaggcatggtagcaggcacctgtaatcccagctactggggagcctgaggcatgagaatcgcttgaacctgggaggtggaggctgcagtgtgccaagatgaccccactgcactccaacctgggtgacacagcgagactcagtatctgaaaacaaaaaacaaacaaaaaaaaactgagcttcatgtctcgctcaacttaccccagcccccttatgcccctctgcaagtcctccctatctaaattaatgatcactttaacattacaagtttcttagggcaaaaaccttgaatcttcaggtattctcatttgtccatctcctacaggccctaatgtcaaaagattccactgctcaccccgttcattactaaaacaactgaaaccctggcccaaaccaccactgccttaacctattaagcagtaccactgcttctacactctataatcaatataacagccagagggaccttttaaatgtgctctcttcctccactgctcaaaacccactccctcaatggcttcccatcttactttcagcaaaaactcaagtcctcaaatgttctataaggttatcaactcccaccttgctttcttcttcctccctcctccttatcctgacccctgcagtcatgcagggctctttgctctctgggtgcttggtttcagacttactctatctaggcttatggcttctacactctctacccactatctgccttaaaaactcttcttctaattcttgcccccagatattttggggctcacctgtcacctgctcaggtctttattttcccctccaggctaccctccctgcacccagatgtttgtctggtttatttccccccattacaaccccagtatttaaacaattgcctgacacacagtaagagagagctcttatatgtggaatgactgaatgattatgcttgcagaaccaaggaatgggtgagacatgaacaagtcaagaactgagataagcttataaagatgatagtcctcttccatttggcatgctgggcagtagtagttcttaaagcagaggaaggaagcatggagacaggagtgagtccagctgccaaaagaggatccacccacattctatcttgccatagagtcaatatttgcagacctcaatgcccatcaataccccccaagaaaggcctggtataggcaattgttaccagttcaaatcataaatggtgctatggatcaggatgatatttccaaggtctttcaaacttcaaaggcctaaacttttacattatggttcattctcaaatatgtcattttttaagcatatggataatgcccatgtttcttaacacatgacaaaataatattcagaaaaacgcttctgaaacaagggagaatattctatatcctgcaaaactcaatcctttctttccttttctttacctagtattaaggaaagtagcagctagctacaaaccagacactcttctatgggcttgacagaggtcatcccactcagttgtcttaatcaggtgagtaatattatgaagttcaatttatgggtagagagataactcctccaaggtcacactgctaatgaatgagagagctgggatatgaccccagacaggttggccccagaacccagggtttctgggtttatgtcacccctgtgtagtgcctcttgtttctgcctacccaataccaatggcaagttgggtcaacaagaccttacatgatgaatgccatacatttattcagagaaggcataaaaatatctcactcatcagtccattcagttagctaaggaattaaaaggcccaataaaaaaggttacttgacattcatattaaaatattagcaaaaaatatgcaaagcaaacaaccatttctcttaaaatgggaaggtaagagagaacagtaagaatagacaaaacacaatattcttcgaaaaaattcttttcaaaactaaatattaagaagcctgcttgaaaaacaagtaaacaaagtcttataaatatagctactcataaaaagtggtttcctttggaaacattcaactgtgtacaagtcggccatgacaactaatgttaacatatttcttcaaatcctcatgttttgaggaggaaacatacaaaagaaaaacaggattctataaagggagaggctctaaccaggagtgggaggaattccttaatctgacattcaatgactgttttctgataaagagggataatggaatggagaaaatttagctaacaaattacttccaaaaatattaattccctactatctcagcttttcaaaagaccaaatggtaataaaaaaggacatggagccgggtgcagtggctcatgcctgtaatctcggcactttgggaggatgaggtgggcagatcatctgaggtcaggagttcgagaccagcctggtcaacatggtgaaaccccgtctctactaaaaatacaaaaattagccaggggtggtggcactcgcctgtaatcccagctgcttgggaggctgaagcaggagaatcacttgagcctggagacggaggttgcagtgagcccagatcgtgccacggcattccagcctgggtgacagagtaagactctgtctcaaaaaaaaaaaaaaaaaaaaaagacttggtatggctaggctaaaaatcaaacactttcaggctgggcgcagtggctcatgcctgtaatcccagcactttggggggccaaggtgggcagatcacctgaagtcgggagttcgagaccagcctgaccaacatggagaaaccccgactccactaaaaaaaaaaaatacaaaattagccaggcgtggtggtgcatgcctgtggtcccagctactatagaggctgaggcaggagaatagcttgaacctgggaggcagaggttgtggtgagccaagagtgcgccattgtgctccagcctgagcaacaagaacaaaactccatctcgaaaaaaaaaaggaaacaattttcaataaatacgctaagtcatacacatatgtataaatggcattataaagacatgaattcatctcatgaactaaatattggattaaatatttcaaagaacatattacttacagacaaaatcttgtgataagaaaagttatacttccgtgctatcttctataatttttaaatgggtaggaggaaatgcagaatctaatttagcttttattttttatttatttatttattttttgagacagggtctcactccctcacccaggctggagtgcagtggcgtgatctcagctcactgcaatctctgctccaccagcctcaagtgatcctcacacttcagcctcctgagtagctgggaccacgggcatgcactaccatttctagtttgtttgtggtttcttgtttttttttttttttttgtatttttggtagagctgtgggggcgggggtcttttttttgcccaggctggtctctaactcctgagctcaagcaatccacccacctcagcttcccaaagtgctgagatgacaggtgtgagccatcacacccagcctaatgtagcctttttaagagttttgttttgtttttactttttggagaacttctttaaataggcatcaaccatcaaccttgcaccttggagcagcttcccagggcttaaaacaacacctgaccaacccagccaaagccaaagccaaagtccagttcaccgccccgaaaccactatcaccattcttaggtggtcaccgaggaccccatcccaccttcaaatcctccttccttctatccatcccctcccccatagcaattacagtatctcaatcctttcaggctaaacagggtatctcccaaaacaacaacaagtttatctgattcgttagcccttaagggtaaaagccattgaaaactagccctactccctccttcctccctgccctcaaaccaggctcccatcttctccggtcaatatcaggaacgatccctagaactaattcagtggtgggaagttgggtctggtatgggcaggctacgtgacagccagcaaaggagctcacctggagctgtggccccacacagggcacttgccgtgtgggcagctgcccaccctgccaccttagtgcctcttggttctgcttcagcctaggcagagaatgatctgatcctctcttattctctcaacccactcaagtatgggccacccacactgcaaacacagaataatgagtctccagaactggagatgcagccccagacaaaggcctagaactccagaccttccaaaaacttaactaatccctggggtttgagtcctacgtgaaaatgagaggttaggactcagtccttaaggtcctttccattctcacaatcaagatccaagattcagctcaggtcctcaggccattcagcctaaagtcggagaatgtcctgagcttgtataattttggcaattttgactgacatgtggaatccaagttatggctgggtatggggttggtgttgcaggctgctttactgcttaatgattactaatacattacagaaaaatggatgaaaacacttcaagatctcttgatttaatgatttaacattaagtcatttaaaatgatggaaaatgaaatggtaacacagctaaggcacaagcaccaaatcttttttatctttggaaatgaattcattcaatgaaatacatactgtggatgctatgtgagaaacagttcccgtcagctgggagtctaacactgagtattacagccattcctttgatttttctccctccctcatatttggagattttaaaacaaatgaaaggcagcattatttcagcttaaggcacaggcataagtcacataagaacaaagaaggttttattatcacattaagcattgaggaggaaatgtgcttaccgataactaatttagtgttctaggctattaggttagtatttgcttcttgcaatcttctaggccaatatttactatttatatcttgatggaggtaaaaatgttcagctagtgagaaggtcattaaggagagaaagaaaaaaaaaagcccttggaaaatggaacaaagtacacagatagggagaaaggtaccctttgcgcctcagtggtctatagaacatttgccctctctgcctataaagtgatttaacattaaccacatttcactccagcagcagagtgctatctcctgacaaaaactcctttttgaaagcctgggggaaaaaaaatccacatacacaaaagaatgtgaaacatattgccacaggccagtgtcttgggctttttgcctaagaggtttgctttcagcaaagagaggggggaaaaaaaacactctaacaacaacagcttgtacagtacagtgaacagcctccctgctttttggcagactttcccagcgaacagttccagtggcagtgccttgagcccattcaagaattccatttcataggaaaggaagtgtttcagatagacctatttgatctttcagcatgtgcaaatgcacctgctaaatagctagtctgacagcccatatagccctctccccagttccttcttctctgtcttcaccagtaatcatatgggttatttcagacttggactaggtgagatgaaaagtacataaaaatcacgccaaacgttgctactgctgctgcacgagctcaggctcgacgtgcagatggaattcccttctccccacgccaacttccctgtcactttcttcctggagcaggtaagagggttttgttttgttttcagcttccgaaggcttacctcgaggtggcttcctcccctgcctttgcatggctgttcccgacggtctggtccttgccgctggggtggtaggctgttagtaccactccctgggaactggagagccagctcatggtgagagaagggacatactttctgcgatcctgacacagagaaggggaaagaagttcctgtctcgcctggcaactcgctcattagcattggccagctcctccccgcaggctggcgattcacacggggaggggcggggtctgtccagggaagggcttcctgcctctccaattagaagctgcaactcacagcatggtttcaactctggacaattgcactctgggcggctttggttaaaggaggcgaagggtggaagcgacgggttgcacccacccccaagttagtctgatcagattaaactgccagaacgtatattcaactcatcactgtaactacaagccgtcttacttaggaaaccatgagttgctgccaaggcttttttttttccctccccaattcctctatcttataatttctgctacttaatgtaacatgagtaaaggcatttcttaaccccttcatgttcagcgttaaaattagccatagtaaaaaacaacgaacccgcggcaaaactctgcaatccagacgacgagaaaggcttgatccttgtgtccggttaaaaatgccctcataaaaattgtgtgtcctggaatgtcgtcgtctttcacataaagccaatctcaaatatacgtcttgttttagcaaaatatttttcagcaccaaaaagggatagacctaccaatgctctgttaagtgttattgctgagaacaagagaagtccctgccatttgttgagcacctactatatgccaagctctcatggacgggggtttcacatgtattatctcattccattcaattctctctctctcacacacacacacacaccgtacaagataggtatcactatcatctgtgttatacataacacaaggaaagtaaggctgagggacgagttaagtaacttcactaagataacacagttgctagtgccagaagctggatttgaacagaattctaggctacattccttttatttttcaccagtatgctcttctttgttttgcagattaagaaacaagatcaaaattatcataaacacaaaagacagctctgttctttctccccatctcccctccaaaaaaaaaaatcacttttttggtttgtttttgaatcagggtctcactctgtcacccaggctggagtacagtggtgattgtaactcactgcagcctcaacctcccaggctcaagaaatcctccagcctcagcctccccaatagctaagaccacaggcatgcactaccacgcccagctaatttttttatgctttgtggagagggagggtctcactgtgttgcccaggctggtcttgaactcctgggctcaagcaatcctcttggctcaagctcccaaagtattgagattacaggcatgagccaccacgcctggcttctactctgacatacccagtagtctgaaggtttttttagatttttatgattcattcaactctctagaattcctcttgaacaagtttccaattccatcattacataaacttattgcttataccttatcattatttaaaacagtcatgaaaaataatttcttcctccttacatactctagaagtatctgaaatttatttttgaaccctctttcttataatttacaaaagtcttccttaaaaggaatttatatcttcctccctcccccctgcacaactgctcaaccttcccatttccacttccataggactttacttgctgtctcctttttatccccatgacctcaaccacctctggatcctataatgcagtcttagctccaatattacaacagcccttttagctcatctccctgtcacctcctttaaattgctttgacattatgatcacaccctggcactcatgatccctctcctcgcttaaaaaccttcattggctctctattgctaacagagccagttccaggcttttgagcagatcactgggcattcctgctaccttatacatacaagtctttccatctgctagacacaatcttttcaggtcctactatgattcttttctcttcatctgacagctaacttaaattttgtacctactgagccttcagtaaacactgaatggaggaaaacctgaatgaattgaaagtatcctttaaaactctactaaatttttttttttttttgagacagagtttcgctcttgttgcccaggctggagtgcaatggcatgatctcggctcaccacaatctccacctcccaggttcaagcgattctcctgcctcagtctcccgagtagctgggattacaggcatgtgtcacgacgctggctaattttgtatttttagtagagactgggtttctccatgttggtcaggctggtcttgaactcccgaactcaggtgatccgcccacctcggcctcccaaagtgctgggattacaggcatgagccaccgcgcccggccaactctactaaatctttatattaaaattggtaatattagataagcggttcccatgcacataccagtgctaacctatgaggaaatgttcatcagttcaggcaaaacaaaaactataaagagagggaggcaaagattaaagtaaattagaatatatgtgttttgtcttttcagtgtccttacatggaaaaaatgttaataaccagctcatccacccctccttttttatgtagctactctgaaatgcaaacatatgggaatcactatcttatacaattattgatggtaatcactacattatcttttggaaattcttttctgtttccctcccacctttttctccccccttacttccctctacctccctttttattatcttccttttttttctagttttccttcttcctttgctatgtctttagcctgtcaatgtcatccatgcccattggcagccacgggcactgcatctctcatgtgacagtttgcgatgaagattttgtccagttatagccaaaacaattatttagttatatttttgcctaattatggtcttttcacttgtttaataacaaatcacaatgtacaggttgaaatgtaattgttttacaatgtcaaaataatatttgggtttgcaatatccaccgtttttaatttctgtgaggcagaaaaccaaatgtgatacaaattgatttacatagcttagtacataaaatttgaatccttctaatttagctctcaaatacctgaaaatcctctgagctttttctcctttcctcccaccaagccctgttgctactggtcgaagggtattacctatcacaggcagagagctggtaggactgtggcctggtgttcatagcctcagatacatgctcaagtagattaaaaacagttttcagaattttcccatgtcatcaaagaagcaaacctaactaccagtgtggtctcttaaaaagctgttctttgggaggccaaggtaggtggatcacctgaggtcaggagctcaggaccagcctggccaacatggtgaaaccccgtctctactaaaaaatacaaaaattagccgggtggcgtggtggtgggcacctgtaatcccagctactcaggaggctgagacaggagaattgcttgaacccaggaggcggaggttgcagtgagccgagatcataccactgcactccagcctgggagacagagcgagactccgtctcaaaaaaaaaaaaaaaaaagaaaaagaaaaaaagaaaaacaacgacaaaaacaaaaacaaaaaaaaaaacctgttcttatttcacactgtaaactgtactaaggtttagctcatgtccatcccttataccattatcgctcttttgcagagacaaatattatgaaaaaaaacaaaacacttttttactcctttccgcaaccattttaaacacacactgagaacctcatgaccttgaagatgttaatattcccagctattgagtgcgtgccaaacactttcctgttatgaaacatcttaaaaagtaattaacaacatcaagacagtttaaacattcatttcattcattctgtttaaatgaggtgtactagatgacacaggaaaggaaaaggaagcggtaatttatgtacccaaataggttgttaaaaatagggtgaagatggtactgcagtctctgacaatttgacacccatgttcaaaaacaatgaaaaaatttttcttcagttcagtgctagtggtagcaaagagtttattagctggtttttatatgttgatttaggagcctatttagtattagaaggaattgtattagaagagtgccatgcaatggaatcagcatataatttatcaaatttttcctgaattggtctagttctcttaaaaaaaaaaaaagaattaaaggagaatatgtacacacaatctctatatgatgatgaaaatctacatagggacaaaagccatgtgaaaatgaccttccaaatggtaaaattaaacccaattttcaatattataacaagaacttgaataaattaatcaactgtgaagttaaagttttacataggtgataaaggctagacatatgaagcaggattgactaatgaagaggaagagttcttaacatcccttacctcatgttttatcaggacctcgtaggaatagttcttgtcagcttacaaagttagctacctctgtgctagggtactatgactgaaaattattccatatacagaatctcaaactatttccttgggaattacactcattgttattaattctgtctctggaacaacaagaaataacccttttccctttctctggacagctctaaaaatgtctacgttattctcaaagttattttcttaactgctcctcctgcgagaaaatactagccatgcttgggataatttgtaactgctattgccagaggctaatttaggcttttcggcaatcatttagaaaagatgtttcttacaaatagtttattaccaataaataacaatagctaatattgagtccttactcttcgctagacatggtatacatggtctatcatttaatcatcacaatcaccaccagggatagaaattggaattacgctcactttagagatgaggaatatgaggtcatccagttagtaggtggcagaaccaggacatgtaaacctgggtttatgtgaccttggagcctgagctcttaagcattataaaggttacagcagtcctagaattgacatcattttatttctgaaaagaatcatatgaataacaaagttaaataatctacagcaaacctaaggtccttaatcaaatggaatattgatataaatacaatgctatggagatttacactcaattcttttctggtactttgaaacttgtttttttatgtcaaattattggggtagtgtggcataatatatacactagtctaaaaggtcatcatcattgtgccatcatatctaaaattgtttccactgatagaagtgaaaaaaagtactctgatcactatgattatgaatttttttttcttaaaaaagcagattcgatgtgcggaacccaaagcttatagaatttgttagctatggagccttggatgaggccttatgcaagagccagactctgaagattcaatctcatttaacttcatgagaaatctgcccttcatatcaaaactagcctaagctggaaattatccaagaaaaagtgccatgaccctaaattttcttttggttttctcttcattgacaactagaatggagatacatgttgcaaacacttgcaactggaatgatgaagtatattctggaggctaatacgtactggaaaagtagaattttgtttatgaatataaggttcaattttaaaagtctacaattgtatcaatattagatttgtcaaatacaaaaatccttgtcctgcagtggattacaaatgatgcttatccccttgttatgtaaaagcagccactgtgagtggggaagaatggtgaagctgcagatctaaggaaagggatgagttgattcatggcttggagaaaaagaaaaatggaaggaagccatgtttctttttttttttttttttttttttttgagacggagtctctcgctctgtcgcccaggctggagtgcagtggtgcagtctcagctcactgcaacctccacctcccaggttcaagtgatgctcctgcctcagcctcccgagtagctgggactacaggcatgtgccaccacacctggctaattttgtatttttagtagagacagggtttcgctgtgttggccaggctggtctcaaactcctgacctcagttgatccggcttccttggcctcccaaagtgctgggattacaggcgtgagccaccgcgcccggcctttttttattaatggtggttatccactccaaaatgaaggcagtacttctaatgttttaaagtagtccctggagtattatatttttttatcaaaatacttgataaaactgcacaaatgtcattaaataataatttctatattctgagcccattggggaattttcagtcctagaaatgtcctcaaaaatggcaaagctttctgcttcccttcttgaaagtagaggggaagaaatggtgaagcaaagtttttctggaaaaaaggaatcctagtaccctacttacaaatggagcatcttaaatattcactagtgtacttgcttttctggtgaagagatgagattcacatatcatcatggatcattgccctctacaagtgcacaaattagtagcaagaacaactattttagggccatgtaagttatcagtatcatcagaacttgggccttaattactaatatcttaaaatggagtattaagaaacaatagaaaaatattagtattctcttttatgacaaagcttcattagttttctagagtatatctagatatatgtgactgtatttcacagaaaagttttagtttttcagagaaaaggaaaacacaccctcaagataatttcaaagaggaatttaatgggcatgggaggtggcttatttaacagtaatttttttctggtcaattgaatgattaaatattttcattcttaaagattcagaacatgcagagttgttttgcacaagcagccactgtgtcagcagagattggaaacaaatactagccaaaatttttttaatgccacaattgaatgctggcacagaaagggacaaattcttaatgtctctgcaagcaaaaatctccagaaactgaatataactttttttcaaatttgcttttactcagataaatgggaaagtaacaattcctggcttcctgacatgacttcaactccgggccttgtgaagattctagatgagtcagccttgatctgtgtctagcagagcaagttacacaaattcttctttttttttttttttgacacagggtctcactcttgtcaccaagctggagtgcagtggcacaatcaaagctgattgtaaccttgaactcctggactcaagtgatcctcccacttcggcctcctgaatagctgggactgcagacatgtgccaccacgcccatctaatttttatttttttaaagacagggactcgcccgtttctcaggctggtcttgaactccttatttatttattatttatttatatcaagtgatcctgcctcagtctccctgagtagctagtatttcaggcagaagcaaccatgcacagcaggttatatgaattctaatttcctctgctactatatatagacctctgggaaccaaggttttcaggaattattgttagcaaaatgaaagcaaaataaattatatatttaaaaaatatatagtcaggtgtagtggctcactcttgtaatcctagcactttgggaggccaaggcaggaggattgtttgagctcaggagtttgagaccagcctggacaacatagcaagaccttgtctctacaaaaaaatatatatattctatattatatataatatataaaatacatattctatattatatataatatataaaatacatattctatattatatataatatataaaatacatattctatattatatataatatataaaatacatattctatattatatgtaatatataaaatacatattctatattatatgtaatatataaaatacatattctatattatatgtaatatataaaatacatattatatattatatgtaatatataaaatacatattctatattatatgtaatatataaaatacatattatatattatatataatatataaaatacatattatatattatatataatatataaaatacatattatatattatatataacatataaaatacatattatatattatatataatatataaaatacatattatatattatatatatataaaatacatattatatattatatataatatataaaatacatattatatattatatataatatataaaatacatcttatatatcatatataatatataaaatacatattatatattatatataatatataaaatacatattatatattatatatattatatattatatatattatatattatatatattatatatatatattttttgagctcaggagtttgagaccagcctggacaacatagcaagaccttgtctctacaaaaaaaaaaatatatatatatatattacatatatattatattataattatatatatatgtaacgttagctaggcaacgtggcgtgcacctgtagtcccagctattcaggaggctgaggagaaaagatcccttgagcccagggggtcaagctgcagtgagccatgatcaagccactgcattccagcctgggtgagagagcaagatcttgtctcaaaaactaaaactaatatgtgtgtgtatatatatatatatgtgtgtgtgtgtgtgtgtatatatatatatgtatatatgtgtgtatatatgcatataagtgtgtatatatattcacacattattttgtggaaaaatagaatcttattaaaatttatttggggaagaatttaccttgtctcttatatgaccattatgaccattggggatttttgtttccagaaataaccattattttttttcatataagtgagctataggtaaacaaattttgtactgtatcccctcaattttaagaaacagattttaacatattcaaaattagtatataccttaaaatcattcagattatttgatacggtggcaagacttatttcccaaaaatcaattgacttgactcatcttacaattaatagaaagctaaaatgaagaaataatgtactctgtctctggcaagttttggtgtaatttacttacctacctcattgggtataaagtatttgcttcattggttatatattctttatgcaaaaataaatttctagtaaaataagtaaatcacatccaaaattttgagtatcgttcatgatatgtttttttggagcaaagatccgtaattttcaactgattccgtgccttcagaaaagattgacaatcactgtgtagatattactgtaaaggcttttcacccaaatgccccataccttactctaattgagaaagatctctttatataatatcctagcaccaaaatggtttgtactcctgaaatatgctctgcaaatagctggaaaggttattttccctaattctatttaataatttggctagctggttcgttacaatggctcaaagaacacagctataatcacaaggaccttggccttctgaaattttaaaacagagacttaaaattacagggctgaggttgtccagagtttatatgtagtccaaatatcttttttcatagaaacagctgctaaggaaacaaaggttaggcaacagctggtcaggcaaatggttacagagccaagactgtaagatttgaggaaaactccataccctgaaaccaaaacgctttcttacagtgtaaattgctccagttcagagactgcctcaacacccagtccctggctctatcaaaataactattataagaactgatgccaaagccttaagaatcactcataaataacgtcttcaaaatttctattccaccccgccccacacaccaccaaaaaaaaaaaaaaaaccacaccaaaaactcagaagactgtctatacttcaaacagtgaaaaaaatcaaattccactacagagagtaaaaaatatattattttccatcaacccgtcttcccagtaactatgtttcatttttggtatttttctttaaaagtctataagatacatttttttttttttttttttttttttgagatggagtcttgctctgtcacccaggctagagtgcagtggcgcgatctcggctcactgcaagctccgcctcccgggttcacgccattctcctgcctcagcctcccgagtagctgggaatacaggcgcccgccaccgcgtccggctaatttttttttgtatttttagtagagacggggtttcactatgttagccaggatggtctcgatctcctgacctcgtgatccgcccacctcggcctcccaaagtgctgggattacaggcgtgagccaccgcgcccagcttcctttttcaataaaactacatttttaatacagatatgtcatattcctacaagtaaggattaataacaataaacataataaaattctgtctagccatcatccttctaaggacatcacaatacattttatacatagagagaatacctctaaacactgcagattagatatattcatcaaaaaaaaaaagctttaatcacaattggcatgagagtgaagaaaagcagggagagagtgccttggtgtgacaaaggtagatcattgaagtagttttaatattttttccagaaggtgactataaccttccaagtgtttgagattaaatcatactctgtgatgttctgggaaatttatatcactataaattatcaagcattcaaatcaaggcagtagagccacatttggggtcacaaaaatgagacatatatcagaattctccttactatgtctgccaggctcaaaagtaatacttgtcttaaccttacaaagatcatcaaaataaaactgtagtgggcaaatgaatacatcagttggagaaaacaaagtgaaataggcagaggccttcatgatttcatttctttcaagatagactgcctttacagtattttatgcagtctattgggagcattcatgtattagaggcatataaaaaagaaattcagtagagtcaccatcaaacatttaaaaaagagacttgttcaaaggtttcagtccagagcagaaattctaccatctcagtgtgaacaagaagcacaaaatgatcctgtctgagactcctcagctcatccaagagcaggtaccaggcaccagcaatggtctcctccggtgttttgagggggacaagtagacctgcctccaataaaataattccctatcaatctgcagttccaccatcaaagtcacatatggggttatattgcagagtcactgattcacttcaatcaaatagttgtaagaagaatagatgaatcagatacaacaatcgggcccccaggtgtttatattcagttaggatggacacatgtgtgcctatttatgacatcaagcattaaatcataaatgcaaaaataagtatactctattgctaagtggacctttagttgtaaatatttccaaaatctattaaagtttaacaattaaagtagtgggcatatgtgattttcccgtaagttttctgtattcaacacttattataactagagaaaatgctagtaaacatacatcaggtactaacgtactatatcttgaattagggtgggtagagcagggctgttcataaggagggggaacaaaagaagccaaggctgactgctgacactaggtcaaggtatgttcacaaagtgctgtgaagcatgcaggatggggaaggggaggcaggatagggagatccgccatagaaatagataaatttctaccagatgttaagggacatccagtgctttgcaagtatttcatctatattccatagcagtggggaataatccaaggtaaccgagagagatagcaacataatcagatctacacaaagagaaaacacagtggtggctgtgaataaatagccaggaacaggaggaaaagatggctaggaggttgccacggtgagcatatcagtaaggaggctgcaatgataggacaacaggggcagatccatctctgcttcatcatctcccccagcacgtgctacacacagcagggccaatgcaaagacacactgcagcaatagaatcttcagaacctcatagatatgtggaagtgggaatgaaagagggaatccaaaactatcctatggattttacgctagatgaatggagatgtctaacaaatggttagaagacagactctgatagtcccccacaataggaaggcctcgggcatacagttttgaagtgtgtggcagaagtcagtaggtgaggaaacagtgttgaaaactctcttttcataattgaggttccatttatttattttttatttttattttttgagatggagtctcactctgtcgcccaggatggagtgcagtggtgcgatcttggctcaatgcaagctccgcctcctgggttcacaccattctcctgcctcagcctccccagtagctgggactacaggcgcctgccaccgcgcctggctaatgttttttttattttttttatttttttattttattttcagtagagatgggtttcactgtgttagccaggatggtcttgatctcctgacctcgtgacctgcccgcctcggcctcctaaagtgctggaattataggtgtgagccactgctcctggcccataattgaggtttttgatctctaggcagccttccccaagagaactagttgtccaaaggattttttctgtgtctgccttattcacgagtgctgcatttacccatttcccagggatgcttaatttctacactgggagcccacataggtgctttaaacttcaaaacttcagggaagtttttcattaaggatacagggtttaagggcagagcaaaggagggtggagaagatagatcagaaaggtgaacttactaagcatcaagttttagacactcgctgagctctttaagatattttttctctcttaatcccccatttgacaacagagggatgatgatacttcaaggtgtgtcagtgacttggttgcccaagatggtatagccagcctttggtagaggctggaaggaggccaggctcacttggaagtctaactgcaacttccaggaacaggcatccatatcatcttcatttaggtttgaggactttttttttgtttttttttttttttttctgagacggagtctcactctgtcacccaggctgcagtgcagtggcacaatctcagctcactgcaatctctgcctcctgggttcaagcgattctcctacctcagcctcctgaatagctgggattacagacatgtgccaccatgcccggctaagttttgtatttttagtagagacagggtttcactacgttagtcaggctggtctcgaactcctgacctcgtgatccgcccgcctcggcctcccaaagtgctgggattacaggcgtgagccaccgtgcctggcctggacatttgatattactgaaataagtttatttctttgttacttgatccatttgcaacctaaataaaatgtgattactaaacagaaaaaaaatgctaaagctaaaaaaggtcataattgaagattttccaggtagaccatgaaaatataaaagcaatttccacaggaaattaccagtgattccaccctggatgtttaaggcctgaaggtctaatacgtactgtctattgctctataacaatataatactgataacttgctttgcttttgggttgacactatggtctgaggttttagtattgatctttaattttcaatccatcctcatagttttgctctatccaagcaaaagaatagtatgaattgatttatggatcacagtttttttgaacatttgctttatatgacctcaaaccaattttctgtgaacaatgaaaggaggaaaacatctgctcaaaaaatgctaggccaggtgaataatatccttcccccctcttccttttcctcttctttaaatagaggcccatccttgtttacaggatgagggcaagaggtaaaatcctttccaaaaaggatgtagtgtatgacattgtttattaagttattctgtaaaactgctacattggctgcccaaggagatttattcaacataagagtagctaagctctcacctatgtcaatagatacctgtgagaggcctaatggaactctaggaaatattggaaaaaacaaaggctctgaggaggtctctctcttaactcactcatgccactaaacttctgtttctgaatccataaaatggaaatgcatgttcctacctaccagggctgttctaaggtacaaataagcttgttgagggggtacagaagaacaggctttcattgaattttgttcattgaatgtctgcatagtgccgaagcctaatatggaatgctttattcccatcatatagacgagaacagtgcaactcaaagattaacagcaggacaagctctttgctcaaattgcttagattaaaaaaagaaaaaaagcagagctaggattcagaataaaatctctttgattcaaaaattcatgcttttcccattattctttcctatatataaagcaccatataagatgagcttagttttgttattattagtttaccaaatctaagaaatcaatcacttgttagacccaccattcattattttgccaacagcttgtaaagaaaaaaaaaaaaaaccactgccaataatattatgaaccaactgtaaggttgcactgcaatttcagagaagtttaaatgtgaatgaaacaaatataatcttagaatcaatgggagacagaaacagagtgcccaagtagaaccaatttttaaatttcataaagttacaaacttggttcttttaaggcttaccaggtctttcaaatctttaataaaggatagagatagagccatttattcagtcaacattgtatacctactctgtgtgtagcattgtctcaaccttcaaggacagcagatataccaaaaaatagctctggatatgacgatagaagactgcaaagataagagggtacacaaagcatggagtagttatttatcccagggacagaacaagctgtcaattttttcatggcaaacacaaaggtcaagttagttgcaggcagtcacttaccacctcatcatctttgttacacacaagtaactgacgtcaaatgcaaagcatcaattttattatgaaagcccctaccctggattcatctgtttatcctttgtcacctttaggaaggtttgtcacctttccgactggcacagaagtctttgtaatgggacatgggttattggaacctgcccaggcctggattcctccagactttgcacatcaccacctgtacccgtcacgttccttggcttggtttttgggctcctggaaagactctgggattgtcccttggctgacctgcaccttagcattttcactgaaacagtcctgctgggatgagtttctgtcttctaggagtacacctgaagacctaaacaaaccccagagaccacctgctatgccctggatcacttggcaatgactcagtttacatcctttaagtttctgttttgcaccaatcaatgaatttattgtagcctgaaagacatgtgttagaaacacagtcattcatttccgaatatcaaagccacttacttgtcacgttaattgattcagcacacttcaagttaattaataaaagaagaaaatccctaactatcttttgatagttgtggattgtctcttaactctctatttcctggattaacatgagggttgccaaattagctctaaaatatcacccatggcataaatattgccaattcatttgtttattgttctatgagaatgtgttccttgtctacgcagtttattcattcagcaaatacttttggcatgtacctactagtgaaaggcactgtgatactcacagtgatggtaatatattgatgaataagatggaataatgaacttgcaaaaagctagtgggctcagatttttaaatccttgagctgaaaacaatatgcatttattaaaatgtcaattatatgctattctgtactatttttcatttctgttttctgaaatagtttctaccccattgcctctgtttgacaaatgaggaaactgaaagattagtcagagagattaaacaatttgccagagataaagccaacagtgcttagatttgaacccaggtctcttgactctaaatcaatcatctgactttttactaaaacatgctgctcatgacatctgttcaaaaaggggtattatggtatagttagacgttccaggctcaggcagatttgtgttgtgttggttgtcattaatgaaaccttagagaacaacttagcagctagagctacagtatttcaaatgctagtctttcaactaacaaacaagacacctttgtttgtttacgtttgaccaaggaaatatcatggatctatattgtattcatataagtgtccatagattcattggaattcattataatgaattccaggtccataacaaaggattgttccaaaggtgacccactcttaagttgaaataacatttggtcccaataactaaatccccctggactggagtccactaagtagcaaagcacttgccagcttgcttactttcagagtactctctgtactctgtctcaccataagaggggtatgaggctgttcttttagctatttttagttaaacatgcactgctaaaacacatacaatagcctaacattttaaaaaagtgacagccttcatttctcatgggaaagaactggttattaatttagatctcccttagacactctctagaaaggcccaattacctgaagtatgaaaaacacttcaaggtatgacacctataacatgttgacatggaatgtgtctcactctttattctactattgtgctatactgaagttatttatacttccgataaccccctttcctctgctgtgcacacacatacacatatgcacacagactccataggattctgtttcctgagggcaggaagttccatccatttccctactctcaatatgccatctggcacacagtcattcattagcatttgttgagcaaatatgccgaagtgccaaagtaaaagccactgatctgcccaaggacacgagtaaatgcctcgagagctctgcatccccacaaaggaggtggatgggtcagtgtcaatcctgagaacagcaaaatcaagaaataaggtagctttaaatccttgctagaatagttatctggttaataaatgctggaagtctgtggtaagaataagctgttgcactgaatcagttattaatacaaccctatatcacctgtgaaggaaaagtaacatcaactataaattctgaaattgcaaggaaaaataatcattttcactctatgcttttacctcccctctcctaaagaaaccagaaccactgtcagattagcaatgactgatttctcaatagtcacaacctgtctttatcttattgagcttcagaatacatgataaaattgcaccaagagaagaatatgaagtccttgattctctacagcacagcattaaaccactactttaatcactaatcaacaaccataatttagcctaattataaattacaagtatctaattttagaagatctttgctttataaatcctagacactggagacattattaacttagctccttgaaattattccagggccggaaacatcccttgtacattcttgctgcatgtatctggtctagaaacagacctgtaatcaggatcttttcttcaggtttctaggggtcagagcagccatctatttggtatgagttgagcatctctgagaaggcaattatatgccacccacccaaatctctcttctccttatacttgaaatatccccttgggcctcagattttattttaatcgctcccccaaggtactggtcccaggaaatgtggtaaattcaagcccttatcaatgtaacaaagacgcgagtcaaggagatccctgaaatgggaaaagaaatcccagaaaggaagggactaatttgtcccagaatatacacacgtgcatggagaacataagccttttgcttgtagctttgaactaccaccaactatgtttctgttgggtgttgaacattttcaactagaactgggacaaccgaagtattatctttaccaggtgtaactactggcataaaaaaagaaaggcaaaaaccactgtggtccttcaagatgtgatgggccagtgacatcgcgctgaattttctgatttgtaaaatgaggggttgtgctgctcctggggacccccgcacacctttaagctcccacatgatgggtctatggtatatatctatggcgcaaatttcactggcagtgtgatggaccacactttgtacatgggcaggtcatataggtatgatgatgacagtcgccaactgattcaaagaacagtgtcccaaaactcctgacctctggagatactggacagtcaagagtactaagcagcaaaacaaatgggggaaaaatgtttgctcccctggcctcctactccttgagcggccttctataggaaattgcaaatcattgagaaagctacagggggctaggcacagcggctcacgcctgtaatcccagcactttgggaggccgaggcgggcagatcacgaggtgaggagatggagaccatcctggctaacatggtgaaatctcgtctctactaaaaatacaaaaaaaattagccagacatggtggcgggcgcctgtagtcccagctacttaggaggctgaggcaggagaacggcgtgaacccgggaggcagagcttgcagtgagccgagatcgcaccactgcactccagcctgggcgacagagcgagactccatctcaaaaaaaaaaaaaaaaaaaaaaagaaagaaagaaagctacagggtagcagctttagcaagtgaatgctagtaacttttttttaccctgaaaatcgcacagtggtgctgatgattagtcattcctgatcatcacatgatgctgaacttcatgaagtacaacggctaatgtgtatggtcttcccgttaagacagaggcagcctagtagagacttggctttggaaaaggaagctagtattaggagtttatctttactgtttagagttgactttatctcaaaggatgtcagcagcatatatcatgtgacagcggatcagtcacgacacctcatctaaatgcagtcatcatagtacgtggtcttcccactgccttgcctaccgtccataaaaagagggtcactctagtccctgacagccatgccttcataccatccacctccagccagaactaataattcaggggtagcagtgtgaaaaagaccagcagcttcaggaattttgggttccagaactgatatggatactaattagctctgtgcaagttaacttttctctgtctccatgtcctaaacaatgaaagggctgattagaccatatgagctctcagctcccttccatcttcagtgattctttgataataatataagttatccaaatggtatcatttattatgattgcttactgtgtgccacgcaccatactaagtgcttttcatttatcatctattttaatccttgcaaaaagagaggaaaatgacattatcctcactttatagattaaaaactggccgggcgcagtggctcacgcctgtaatcccaacactttgggaggccgagtcaggcggatcacgaggtcaagagatcgatcgagaccatcctgactaacatggtgaaaccccgtctctactaaaaatacaaaaattagctgggcctggtggtgcgtgcttgtaatcccagctacttgaaaggctcaggcaggagaatcgcttaaacacaggaggcggaggttgcagtgagccgagattgcgccactgcactccagcctggtgacagagcaagactccatctcaaaaacaaacaaacaaaaaaccttaagactcaaaaatggagtttacagagttcttccctgcttatacctttcagtcaaagggtgttctttgtttaaaaatcacacacaaattcagtgagacaacaacaaaaattcacgtaaaaccagaccgaatatgaaatagtattattctaacaattctattttatcaactgatgacttcactttttactctgcttttttaaactgccaaatcaagtgaatagattcattattttaaacacagtgttgcataaatctagatgattcctctgacaaacctctaagaaggtgtatgacaatgatacgcaggtactgaaatcaaaagcagctttaggaaaactaatcttccgtatctagggcctcgtgttaaaaatgccttcgtcaggggtgactccacttcagtgccaaatgtctgtcattcacctgccacttccatcaagtattaatatgaaaaaaggcaacgtttttacctgttataatgaggtgaacttttagctttaatttgattgccacctgctggctaaaagacacaaccttccttccgcagcaaaaactgcttggtaactcagaaggataaatgcaaacaaatgaaattcatatcattagcaaagccagcgctcacttctaccaggttgtcttctaaaaggaagggaactaatatttaatgtgtctattgtatgtcaggtgctatgctaggtgcttcagattactatattattacatttaatcagttccaaaccatgtgacataccaccattttgaagaaggaaaaacaagcaactgccttcacatcacacaaacaaaaagcagcaacaatccgaaactaggtctcacctagacaacttttcttcatcatcagcatatcctcattccatgattccatgattccaccctaccatgggatgccctagtaatctcatgctatccagaaaatattggtgagctgaggctaagaagcagagctataattcactgtagagtcacaaagccttcctgatatttcacagggaagcagaggcaggccagataaatacctcaaaacattagcagggagagccagcaacaattagtcaaaggtagaacgagaagactgtgaaagtcatcaacagaagcaacataaggggatgagaaaaaagacttgaataattacaaaccttcagtcctttagcaaaaacaaaaacaaaaaaaagaaaataaggagtgttgggtatttttctttggtccatttaggaaagactcatctgctcacccatctcctgggggtccctgggtactggtgctgtgtagcacacacatggcccagcgcctggccaccaagagctcaccatcttgttggccaggcaaatataaaggaaggctttcgtgctagaggtgctcagagcccctctctcactcttatctaccatctccttttgtctttgagagcctttaccactgaaaaaacaacggctagtgtttgagtgataactttgtgccggacactgttctaagcactttaatatattaacttaatcttcacacaatggtaagagataactggtatctttaatctctcttccatagataggagggtaagcaacttgcctgagatcacacagatctcttaagctatggaaccagtgttcaaatctaggcactttgaggcactttgtttcacaattcatatctttaaaaaatagtttacgtggcctctcagagaatcatgatcgccttggtttcgcagaggaagactaggaacagaaagatcaagtgatttatcatatgttgtacagtttagaagccagcaaggccacaagtggaactaattctccaacgatttgtcagtccagttatctattattactatcatgttgcttctgaaaataagaataatgacacaacaagcagaaagaacatacacatgctaaggacatgctaaggaagttcagggtcaggttgttgggaacagaatctgcagtagtaatgatggtggaatgtgcttattccagcaaggctgctggaggttgggagttacctccagacccagcccatcaggctgagaaccctctgttatcttggaggccagctctactccacagagaggcctggcacgaagaaacaattctgttagtgagaagtgattaattagacatcacagataacccctgtacttggaggaagcatgtgaacttccatttatatggtttatcaaattagaatgatcatcaacttctggggcaaattcaaatgtcagctttatgttctagcgtcaattggaaagagaataaaattacaatccactccaaacaccactactctgaaagtaacacccacacaaaatcatatcctcagatgaaattttacttggaagttttaggaggaataattatcatttaacaatcatttttcactttgtctaagaccacgataattggggaatatagttataactagcatttaccaccaatcaaaatattgacaccgaaggcagtgtttaatgagatagatcaggaatttaaccggtccagaattaaggacagaaaatcacaaactgatgatcaccagtgagtagacctaaaggaatttgatgagtgtttctaccttgattacatgtattcaatttcataggacactaaagcttgtattgcactatagtttaaaaatttttttccaccatataatgtgtacgtgttttcctttatgagggctattggaggaaggggaaaaaatgcaagtagagaaaggaaaaaagtaggatggaaaatgtaggagattccacagagaattttataataattataatattcattgttataaaatactttataatcattgccaatagcttgaagatacttatatcctgctctgcccctgagctaaataaactgaatttgagctttagtgtaacatttcaagaaaaatatgtatctagagaggataatcagaatggtatgaaattctcaaaatatatatgagaaaaagtggaaagaaacaggaatgcttgcctttgagaaggaaaaaaccattcggaaataataatagcaaacatttactgaatgtgttttatataccagacatggtgctatgcaatttacatgtattatctcatttaatccttacaacaaccacataaggtaagtattattgcaatttacagatgaagaactgaggattagaaatactcactctcatccaagatcatgagttcacaaatggggaaggtaaaacctaccggcaggtctgccttatgtaaaagcctagcatctcattcaatctgctgtatggctgcaatgtaagaaacaattgcccagcctgtattgtagagaccgtgttgatagacaggttctagtaccactgctgccaccacctgggaatatgactttaggtaaattatcatctcaatacattgctgtcccctcatctacaaagcagcagtttggatgatcattaaagatttttattacttagattctataactccaaatatttgaaaatgtattgaataggaaatgaatgaattttgttgctccagatggcagaatcagaagaaatgggcttatacagaaactgattgtctataacacatggatttttctggcacttctatagaataaaatggaacagagaaacatacagaataagagaatcaataaaaatataagtcccaaactctttcaatgttaaatacatttacattttagcggtattttcatatatttcctaataatggtatagtagaaccaaaaatttaccctgaattcaaattttacaaaataaaattctaaaattatattctgtgcaccttctaattattttcctatctttgaggcagtgactttcaaaaaaattaaattctgaatatcttaaatgctaaaatgattttagtaatttgaggcagttaaaatgtaattttgcagtgctaatgaaaagtgttttaaaacatctataatctaccaaaaaaacatgttgacatatttgtcagaataatccattctaaaatataaatgttttagatgaatttaattatttttctttcaaactaaggctacggtaaataaaatttaagatattgagagaaaatccatatcgtctagccattctactctaaaaattaacttattacttctatggggatgatttgcagtcttgatttctgttctcaatttctctccatttaatgctaggtcttgcatttctggctacctgctggatatctctgctgggcatcccttcaacatctcaactctgaatgcacatcttgccagcctgtggaaattacagaaaggtgtccctaaaagaactttatgaaatgtcagcaatgagcagtcctcagtatctcatccaatgtaacctgaagagcagaccaactatcaagccagcaggaccatgccagtaggactggtttataatcccactgggttaacatatccaatgaaagatcatgtggatctgaaaagaagcatagccaagacaggaaaagcagatacatgcatgggaaatggcggcatctctccaaatgagaggccaaggaccttaccagcttgacatggacactgactagacctcattattgagagaaatatcccaagtctattctatctggcaacccttgtttttgcttacaaacttgtttttttctcataacatggcttcgcatgttctgcccaaaagtagacatagtactatgcaaaccagccaaactcaagaatttcaggccaggcgcagtggctcacgcctataatcccagcactttgggaggccgaggcagacagatcacctgaggtcaggagttcaagaccagcctggccaacatggcgaaaccccgtctgtattaaaaatacaaaaattagctgggcgtggtggtgcacgcctgtaatcccagctactcgggaggctgaggcaggagaattgctggagcccaggaggtggagattgcagtgagccgagatcacaccattgcactgcagcctgggcgacaaagcgcgactccatttcaaaaaaaaaaaaaaaaaaaaaaggaatttcacctttctgtgtcactggtccctgataatgtatcaataaaatggcttctaacttacttgacagaggatgaattggccatgcccacccgaatactcctgtccttgacaagtcaaatataatacaagaaacatgtacgaaacagaaatacagctctgtgatttatcacaatgcaaattcaagtaaacacgtcccgaattaagaaataagatactcaggcccagaaaccttgcatgcccactccacttgcttttctatgtctacccctactatctgaacttaacatgctaaccaattctttgccttttttttttgtagagttgccacctacgcacacacccgtaaaactgaaactcatgttttatctgttaagttttctgtaaatgtaaagatacaatatgtattctctactgcctggctttcttttgcttctaattacgctcataagatccatccatactgttcagactattcagataactggagtttattcattctcattgcttcatagtgctctacggatagaacacaatttatctactctactgcagaagctagggctgtttgtggtttgttgtttattattattactttttttttttgcgacggagtttcactcttgttgcccaggctggagtgcaaaggtgtgatctcagctcactgcaacctctgcctcctgagttcaaatgattctcttgcctcagcctcctgagtatctgggattataggcacccaccaccatgcccagctaatttttgtatttttagtagagacggggtttcaccatgttgtccaggctggtctcaaattcctgacctgaggagattcacccaccatgacctcccaaagtgctgggattacaggtatgagccaccatgcccagccctgcagtttttatccatacagataatgtgctatgaatactcttgtatgtctcttggttcacttgtgaacacatttcaactgagtacatacgcaggagttgaactgccatgtcataaggtctgcatatctgcaactttagcagataatgccaaacagttctccaaagggattggacctatatattatctcagcagcacaggagaggtcctgctcttccataccactgtcaacacttggcattgtcagtcttttgaattttagccaatgcaatggttaatactgagtgtcaatttgattgtatatatgtatatattctattagttctgttcctctagagaaccctgactaatacggattcaacctgttgggtggaaaaacttaaaatcacaaatagagttaattttatcaaacactacatgcatctatttagacaatcaagttttttcatttgttctgttaatgtgctaagttatatttttttaatgttaaaccaatgttatatttctagattaagcccaatttggttgttacatattattttttcatatgttaccagagttggaatgtattttgttagtgacttttgcatctagcttcataaataagagaggaatgtatgctgtgatacaaagaacagtgctcaccccccctcaaaaaatgtccagatcctaatccttagaacctgtgaatacattatattctacaacaaagggatgttaaggttgccaattagctgaccatgaaatctggagtgccccagattagccaagtggtccaaggtaatcagaagagccttgaaaagtggaaggaggaagaagaggaggccagaacgatgcaatgtaataaggactaggctgctgttggctttttagatagaggaagagttttcacagctaatgaatgctggcagcttccagaagctagaaagggcaagaattctcccctagagcttccagaaaaaaatgcagccctcctgacacattgattttagcctagtgagacttgcatggatttctaacttatagaattgtaagataatacattcatattgttttaagtcataaagtttgttgtgatttgtcatagctgcaagagaaaactatgacatgtgcttaagtggcaattctaccaaaaaagtaaggaattctcaatttcttgtaataaccttctcagtgtttgatatcaagattattctggtttcctttaaaaatgctgagcattccctctttttctactatttcaaagagtttgaaaaacactcattttttagtgttttgtagaattcatcaatgcgggcatttgggccaagggtgttcctaagtaaaggttttaattatgaactcaacttatttaatagttacgggatgattccagcgttctattttttcttacatcagttttgttagtttatatttactaggaattcattaatttcaactaaattttcaaacatatcagtatgaagttttcatgatatccccttacctaatgtctaagatttatagggatgtcatgttttcttctttgagattagtatttgtgacttccctttttcttaatcttagtttcaccaaaaggttatttgttcttttaaagaatttgcttttagaatatatgattgtcctttattatattttttcatgtcatttcttttttcccctctatttttaactaaatttgctggtctttttactttctcctatcatatgctcagctcactgatatttagactttcttctaacatacagtcatacatttccttctaaacggggcttaggcttggctaattcatcttacaaatattaatcaatattatgtgctgaaaatatcaaaatattttataattctagattcgattcaaaggctactggatgccagttatgtctttatttccaatcatgtgggttttctctaagtctccatttattgatttgtagcttatttgaaatttgatctccaagatattctgtaggatttcaatcctttgaagtttgttcagactttttttgacccagtatatagcctattttaataaatgttttacatatgctgaaaagaaggtatatgctcagttgtcaagttctatgtgctcatcaagtcacatttgctaagtgatgttcaaatcaaactaatcatgctgttcaaattttccacatctttgggggtttgctttaccttgcttattctattagttcctcagagtagtacgttaaaaatccctcactatggttaaagatttatttctccttgtagttccataaattttatgtggcagttatttcttattgcaaattaatgaactgacattctggtctttacttcagccttccatgagtgtaatttagatacagtgactcagactctgaaggtatcatggcctctggatccccacaaatgtttctgggtcaaggattctcaaactttataccctgaaccccctttgtcagtctggggaaattggtagacactaagtttttaaatgcataaaataatcaagataaccatttcaaaggagttaacttcatctgttatcaatatgttaaaaataattgtgatattgtaacacatgagtttctttactgttacattcaataacaagatcaaatggtagttctcatgacctctataatttcaaattagttataagcacaaatagctttaagatatttgcaacaactgctctgtgatatgaaaatatctgtgatctccactggtgacaaagtaacagatttctgctaatactactatggtttatggcctacattctttttttctttttttttggacagggtctcactctctaggccagcctgaagtgcagtggcatgatcaacaactcactgcagcctccacctcctcagcttgattgatcctcccacctcaacctcctgagtagcaggaactataggcacatgctatcataactaattttcgtatttttcgtaaagacgaggttttgccatgttgcccaggctggtcttcaactcctgggataaagcaatctacctgcttcagactctgaaagtgccaggaatacaggcgtgacccatcgtgcctggcctttacagcctatattcttaaagaaatattcaatttgagacagtgaaaataaatatgcaattttgtttctgtccatgttcacaggcaccctcagttttatctgttaagaggttcatgttcatggacaatagactaacaacttctgcttcaggttgtcaaatcagagataaaccttttaggttttttaagtttaggttttaattttttttttctttctgagacagggtcttgctctgttgcccaggctgatggacaggaacataatcacagctcactgcagccttgacctcctgggctcaagggatcctcccacctcagcctcccaagtaaagacagagagtccctatgttgcccaggctggtttcaaactcctgggctcaagcgatcctcctgcctcagcctcccaaagtgttgggataataggcatgagctactgtatttggccaaatcaaccttttataaagttctctaatggtgttctcacctctagtttgctagctcctgtttattccattctcattcagtattttcttcccccttcctcattcttgccatttattattctttagtttataataaaaataaattcctagtctttctcctatttaagtgttgttttctaccaactctgctattttagttaatgatacaatcattttcttaaggaataggattgttaccttctccaaatacaaatagtaatctattcctcttatattcctcttattgcatttattgtattgtgttttgcattatattgtataccagccatatcgacattattagataacaaatttgtttagagctttactcaactatttcatgagtatgaatgcaatagatgttccataaacatttgttgaaattatgtaattttgtatctaaaaactcttaccttttaattgtgttcatcctttagagatcaattgagtgaataaaaaattgacatttcatttttattgttttaatctcttttctttagaaaaatctaaatctagataagatctcgattttatttatgttaactcaattctggaaagctgccaaatgcccatttatagaaaaactgacaaactgtggtattttcatacaatcagcaataaaaaaattagcttgatacaagaaacaatacaggtgaacctcaaaaacatcacaataagaaacaaaacagatatacatacttaaaagccagacacaaaagcacacatgtatttcattttaaatgaagttcaatagcagactaaaataatctatggtgatagaaatcaggataggaggatatgggagcaggacttggctgaaaagggcacaggagaactgtctaggatgatggacatgtgctttttcttgatctaggttggtggttacacaggtgtacacatttgtgcacattcactgatgtctacattttactgtagataaattatgccttaataaagttaaacactaaagaaaatatgctggccagccacagtggctcatgcctataatcccagcactttgggaggctgacgcagaaagatcacttgagcccacgagttacaagaccagcctgggcaacatagggagaccttgtctctacaaaaataaaaaataaaaaattagccaagtgtggtaacacacgcctatggtcccagctacttgggacgattgcttgatcgcaggaggtcagggtggcagtgagcagagattatgccactgtactctagtctgggcaacagagtgagaccctgtctcaaaaagagatgaacaaaaagataaaaagctgcagcatatagaagaaagtctactactaggcattattctaagaactgaagatatagcactaaacaaaacactgggatatgaaagagaaaaaaataatagtatattgtgattgtaaacttcttttgaccagagcaaaatatatgcctagtaacataatttgaattgcaaccttccagaagcattccttcatgctggtttcccatttttattacagtttaatgtctttattaatacatttttataatacacaagcagttaagtattcattgtaaaaaatatatataggaaatccaaataagcatgaagaaaattaattctccataatcccaccacagaggatatgtttttatattgtctaaataaattatttgttctactattggactatgtccaatagtaacaaaggtttttaactataaatttcaagatcctttcaacattgaaaatattccattcttcgcctgtaatcccagcaatttggaaggccaaggtaggaggactgcttaagctcaggactttgagaccagcctgggcaatgtagtgagaccctatctcttttttaaattaaaaaaaaatccattctaattgattcatcagccattaaaaaaacaaacttaaaacaagaaacagctaggatatgttttatttacagcatttcacaataaagggagtatggatctatgtgacatttgtacatttagtacatattttaatgtgattgaaactaagtctgaggagactatataggcttaagaatccttgacttcagtcactggatatcatcaggatttttggaaatgtttaacacattaaaaacattcataaccttatagagaggatggggtgaaagtagatccagagtcttaagagtaaaatgttttaatgggtcgccaaggcttgcagcaacacttccaatgagggtggaaggagtggttaattgttctgcggtcagtgcatttaggaaacagttcatgtgttttctcaccctaggaaaatcgggaatacacatagtaaagtgatgctctcagaagtcctacagccagaaagaaagcttgtttttattgaacattccctcaaacttatttggctgtccaaactgctctctctcctcctactcccatcttaagtgacaactgggaacatctcaaaggatacgcttcggaaacatcagtgtatcaggggcaccaggtccatcctgaagttcccagctgccctctagcctgcccgccatcttcttctacacacacacaccagagcaccaccactgaaaacccactgccactcaccattgacaccctggtggctccaaatgctaccccttgggacgtgctatttgctcagtgtgactagtctgctcccacttaggcctcccagctggtaaatgccttctcactcttcaccaagttctggtaaaacttgctcgtctctgctagagaggcttagacattttacattccagttttctagacttccattttacattccagttttcacccttctagacatttccacaatatattataattgattgtcttcttgtgtaacaccctacacacaagtctaaaggtaagatccctagatggtaggtcgttttcctttttttactaaggtagactgtcagataagagagtcttaaatattgttaaattaatgaatcaatgaacagtaaattatgatacgagctcttttcagggagggaaagcaaaatgaaatagcagattaaggtgccttgctatattcttatttcatcaactaacatatggtgttcaaagtcttattaaaagtgtatttctgagtaacctcagatctctccatttattatccagtgaaaaaacatctgtcagtaatgggttatcctgtaaaaaaattaaaaaggctgggtgtggtagctcacacctgtaatcccagcactctagggagccaaggcgggtggatcacctgaagtcaggagttcaagatcagcctggccaacatggtgaaaccccatgtctacaaaaatacaaaaattagccagatgtggtggcacatgcctgtaatcccagctacttgggaggctgaggcagcagaatcgcttgaacccaggaggcagaggctgcagtgagccgagattgtgccactgcactccagcctgggcaacagagcgagactctgtctcaaaataataaaaaaaaaaaaagaaaaaaaaggactaaatatcactgaatatacattttaaaatgggtaaaattatgtttcatattatgtatattttaccacaataaaaaagcaaatagaaacaagaattattttctaattgttatgggagagggaaacatacttagtaaactaatacaatacctacaattttttaaccaatttctttgaatggacaatttttaaatgtgttgagctgaaattgaaaacaaatctaagggtagaaacaaagcaagtgaaatgaagttatgaaagcatagatccatgtttttattataaaatgaaaccacaaagagccccttaattagagaaaacagagagctattactgtaaatgacatccccattagtactacttaaatggcaagggacagcttacagctcacgtgtgactatgaagttaactggttttacaataaaacacattctaacactgtctaagaactgtctatgagtgagatttttatgtggttcataagcttattccaaaagacatcccggtataggggttcctagggtactttgacatctgagggacaagttgtaataacagatccttgagccctttactcataaattttcttcaaaggggataatgtttctgctttgatttagactaatcagcagtgactttataggcaaactgcttctttattttggaactttaatcaaaagctctagtctttataatatatacagaaaaagcaactacatttaaactcagtccatcattcacgtgacttatagatatacagatcaaacacattctgcttcttttatttttgccattctcaaaaataaagcacttcttaaattgctttaactaagattttccaggtttcctttatatattatgtaacgtgtaactctgaggaaaaaaatcatcagtgaagaaatagttaatcatataaaaaaaagtgccagcccaaccacagaaacaacactttcctagaaatagtcaaagcataccagataaagagcagtaacaactttctaaaaacaaattcccgaattttctgtgcacctcttgtagttatttttcttaatcaaatgtgaaaaagataagggaaaaaagtattatccattgactctgatgatgtggtggcaaacaataaggttagtattttctgtcacctttttcttgagatgaggctaggaatccctgtactttttaatccccagtatctgccataggccacatggagttaatggatttattttttccactacttcttgtagacagataatccaggatcataaaatagaagaaaccagttcacacagactgagtgcagccaagtggccatcagcttcttcctgttccacttcactgagcaattactgaacagacgagctgtacagactctaaatgaacatcgtcactacctctcacttgttttttgcttctgacctctttaaaggttcggacaaagtaggtacattttgtagaaacctaaataacttatgagaggagtacaaagtaaaagctagttatcaattctgcatggcctgccatgccctttcaccatcctggggacataacttccccccaaatgattccagtatcaaataccattattttgttgctacttgatctacttctaaggcctagtgtttagaccttgacatatagctttgtcaaacaaagcttccatcctccccactctgcagcttctctccctagtcccatgaccctctctctctccacggaattctacacttgaatctctgactcatccctttgtgttttcccagagttgacacttgatctgcttgggctgtggtcccagcccatcccttacaacttagctaactttccctatacttgtcttcagagatgctggacttacgatatcaaccaacctgctctctagctgaccaaattccagacactggcaccccgggcctgctacttcactgtaatttgtagactgcatactcgatacaataaagagtatgaagttattatgttggtgcaaaagtaattgcggttttcattacttttgatggcaaaaaccgcaattacttttgcaccaatctaatatttggcagtaatgcccaagctatttggggaggtgggagaagggacacatttgcacagctaaagactaagacttgataataagaactctgattcaaaaacgagacatatatcaagggaaaaactacatcttgtcagcacaatgtgaaacatgcaagaggcttcagagaactgtaatatgtgacacatcgaataagcttacctcaaaatataagtgaagagaaaggtatcagaacatcctttaaagtacattatatgcaaagttagtaagagtaagtttggccattttcaacaaatcctttttttcccacataaccacagatataaaagaatctctggataatattacaggagtaatagtggaggagacacagaaaagcacgtgcagtctctaccatccaggtacaaatagcaggaaacaattatgtatataataaaagttttcccaaccctctgtaaaacccacaacagaagcagaatgttggaaacttgcaggcttctatctaggttgggggagcttttctctggttatatatgtttaccaagaattggcaagctattagctagttggacctattattccaatcagataaattttatatcaaactgatgaaatgagttcaaaaagaatggcttctataaaaacaaacgtgaatgccacatgaatccttcaaaaggcaggttgccaagaaaaactgcagttgaattaggagagagctagacagctataaaaaaactagagagaaatttataaaaatctagaattcggccgggcatggtggctcacacctgtaatcccagcactttgggaggctgaggtgggcgggtcacctgaggtcaagaattagagaccagcctggccaacatggtggaaccctgtctctgctaaaaatacaaaaactagccaggtgtggtggtgcatgcctgtaatcccagctacttgggaggctgaggcaggagaattgcttgtacctgggaggcggaggttgcagtgagccaagatcgcgccatcacactccagcctgggggagaagagtgagacttcatctccaaaaaaaaaaaaaaaaaaattaaaaaaaattaaaaaaaattaaaatctagaattctactgtgatggcaaaagaggttttaaactatagtactatatggtttttattatttatagaacaatacaactcaaaatacatttatgtccttatgtttccatatgttatatgagcatggggaaagacacaaagaggtatacaccaagttgtaagtatggatttcctatttttgtactattgtttggaaagtggctatggagacaaggtgagggggaaaagactgaatgtgagaaaaaaattacacaataaataacatcataaagataaccgtgaaaggatgattattgaaatatcagtggtagttattgttgaacaattttaatttcatacatttcaccgtttgtatattttacaatgaacattattttatataatcataagaaaaggaagctgattttcattttgaatttttttaatataaaaagagtgagaacagaaaccatgagattaacttttgggggaaagcggggaatcaatgcccagatattgcaggaaaattacttttgatctttgctgacagagtacctaccattataccagacaggaaagactatagtgaacaatctctatcatttaattttctgaatcttatgttccatacttcagggaacgaagggatcagtcgtttcaaacctcatgctcagcttttagcaggacattttcttgtccacgtttacctgcagtattttagtagaaaattaacattgcctgtttataactagagcccatagacttatttataattctaagtcaacttgtcttctggtggattttcaatatttaactctgggccagtgcatcattcaagcattgcctatcacacgttataatttaattgaaagagcaatgcactcattatcctttgacttcccaatagatgcagaacatccgattggaaggtgctttgtgttaattgcaagggataggggactttgacattaagttctaatgatgcatttccatgtagatagggaaaacaaattctaaggacatcttgattcttttaaaagttgacttaaaagaaaaaatgcaatagggaacaaattctaaaagaaaaataacaactttgctacagtgcaaactactaactcaaaacatctgggaccagtgataagaatccagctccaagctggacacagtggctcatgcctataatcccagcactttgggaggccaaggcgggaggattgcttgaggccaggagtttgagaccaacctggacaacaaaatgagaccccatctctacaaagaaaagtccccaaaaaagaattcaggtctacttatggtgtcataacaattctttggagattttaggacgtgaacatatatgtatttttttaaccctttttaacattttttcctttccaatacatctcaacctttaaacagtactactcagaaaaatctacacacctcaatctattccttcttctctatgaattgttaggctagaatagccgctaccatttaggtgtatggtatcttccgtacatcaggttcttcacccattaggttggtgcaaaagtaattgcggtttttgccattactttcaatggcaaaaaccgcaattacttttgcaccaaccaaataatattaactcatatatgggggaatgaaggctcacagaaattacctaacttgccatgtttctatacaaataggaagtgataaaactgcaattcagatacatctcaccctggattctgggtgagagcaggtacaatatactcaagacaggggcacaccaatgcctccacttttgctattggctcaattggtcaaaagctaccttaggagtaattttataagattaggtttactcaaagtaaaaaaaaaaaaaaaaaaaaaaaaaagtatgaaattaatctctactaatctggaaccactgcgtaaaaaagtgaagtcctagaaaataaatacatttttaacagttttttagaagatcaggtttactttggagggattccagcaccttagttgtgttccagaactgtttgtctccaaatttctccaggaaggtcaagagaaaaaaaaatttattctaaagctactgcagggtagcatcaattttctgggttccctgcaaaaaaccacttccattcattctgagttaaaaggaccataactagggagaagccctcctgatgtggcctttaggttcataccagactattagggaaactggttcatgaaaacactcccagcggtaggaatccgggtacaccttgatgcagctgcctttggctgatgcaagagtcctgacagacactgatctggcctgtttcgcttcctggctcttctcatcctgtcttaataattcatttggttttactttcacttacacacaaacacccacaccacaccagtgtatcactaggagttgttattagtatacttaatacaaatgtcaagagcacgtattctgagctcatccaaaaatggaaatgtctttttctgtgaagaaaatatggctaattccacaaatttttctttttctcctaaaagtaacaattagattgtttagatgctgtatactctgtaacatacaaaaccagacctttaaatctcatgtcaaaagcagaaatcaaacacacaaaaatcagtgaatttattagcaggatggcatagtttgcaaattacctgctttccatttttcttctctacatctagttaccgtaaaaacaggcaatgcggcatggtagaaggattctgaacttgaccatcaggagccctggagtctaggtctggctctcccactaaactgtcattgtgctaccatgggcgagggccttaacttctctggccttagtttcttgatatgggaaacaggaggaaagatgaacaaccagcttctaagatgccttgcagactaatcccctcgttggagactagtgatcccacctttgacaatgcttccctactttaacctttcacttgaactgtgaactttcattatcattgcccaacacctccattagagaaaacaatcacttggttacaagactgaccaaacatctgctctaatcttgcaaaaaaagaactgaagaagcaggagaaatggagcactaccaccttttgtgcgaaatgaaacttgtggttatttgatgctgctgacaaaggacattattacactatttggaattacaaattaggctagaggtagtgttagatattaagcaggttctatttcatggtaattaacaaggatagaaaacgacatgctaaatcacatcagaaatgtcttttggctgtttttcttaggtacgccaggaagaacttgagtcacttttattgcttttcttattcctgtgctcctgaagggagaggggaacaggcagaagaatattagtcatctgcaattaattactcactgaattttctaagccatgatcatctttccttttgagctttcatctaagtatctttaagaacttctgagtattaattatgacaacactgtcttgaaataatttttggctttgattaaaaattatgtgtcctacttttagttactctcttcaggtgtggagcctaaggaatcccagaaggttagagtttggaaagatgttgaagtacatccggaccgatccccctcacattttacagtttttgagactagagaggttaagagacttgcccgatttcacccagctaatcaagagacagatttagcctagaatgaaccacatcctgttctccaaggcctcatttgagcttgtgccaaaataacatatttcataatagtcttgtaaccactcacctcctaagttactttaaaaaagtaatttatggataacttcctcagacacaaggccagcatgtaggtggaaatgcctgctgccatttaaagatgatctgaggacttacgtgaaacatatttcccttcctgaaattttcagtatttgtgatataggctaaaattcgggcaatcaagattaggttaattatctctacatggcaagttattttggagatgaatgagatgaactgtgttcaaatgcaagaaagcagcccctaaaccttaaaaagtccactttatctagctagtaacattaaaacattaaaacctgggttcaagcattatgccatctgtgagggatagcaaaaacaggtgaaatagcttcttttcttaatgtcacctacagtacctaagtttctctagggccactgagcggtgtgggaacgacataaaagaatgattgtgggtgagaaagaaacaggaaatcactgagggggtgcctaaagaatatttcttattaattcacaatatggcagaggtccagccttcaaatgcaatgcttatctcaagggaacaccacactgacatagttcaaagttgggccttgagaatcagaacaggctcctccacttgacactcatgagaccctgggcttgttatttcacctccttaagcctcagttttctcatccataaagtgggataactgccccccaccacagaactgttgggagaattaaatgagataatatataaacaatggtgatgttagtcatcagaaagtagtactcaataaatacactcaaacttgcttcaagacaattggcccatctttactccaagtggctgttaatggtttatgttgttgtgaagcacagagatactcatggagcattcttttcatgatgctatttttcttctcccctaaaaagctgttttaaaatatatatatatttttgtatgtgtgtatatgagagacagggtctcactcttttgcccaggctggagtacaatgcatgaccatggctcactgcagccttgacctccctggtctcaagcgatcctcccatctcagcctcctgagtagttgggaccacaagtacatgccatttcttgattttttgtaaagacagggttctccctatgttgcccaggctggtcttgagcatctgggctcaagcagtcctcctgcctcagcctcaaaaagtgctgggattacgggagtgagccactgcacctggcctaaaatgaattttttgtttgaaggaatgagacttcaactaatccttctgaccaccattattttttttttctctagagacatacagaaaatgcggtgaaattgtattgacctgggtcatattagagcatctaatctgaatacttcattctttgtctctaccttgtatatccttcttttgttttctaccttttgtttgttgcttcttactctgcctcacttggctctcttcctcaaaggaggcacaggtgataaaaagtgaaaaaagttatgaataatagttgaaaatacaaaaaaattacattagagcccaaagtctgggagcttcatgacctaaaaaacaaagacctctagagaatacatctgtctgctttttggtgattttttttgtgcattgtataatgtcacaagcctgcgtttctgaaaacaaattttaatccaaaaaaagcacagaaattcattttatagagctcataaaactatcccttgagtctatcatctttttcaactactcaatttactttatttttgctatgattagggccagagtcatttagtagaaatgatgccaggaggtctgtttggtgaatgttctgccaaacataaagagttggcattctgctcagacttttcaaaggaggactccaagtgggagataaggcagaattttacactggaaaaatataaggtcaggtattccttacgttaggtatcagtagcctaaaatcaattattcacttcagaaaatacattctatcacaaattgaaatgaaggttacatgtatcctacaaatgtccccatctcttttgttcttgcgcgccatctagtgttatttaggggaatacttagctacaattctcacgcccaatccgggctggaaagaaggccttagtctggagagcgatcaactagtccaataccctgccttcgtttttcattgaaagccgagtcactgctttccagaggtgaaacagataatcaccgatcattctgaaattagattttattctgggatactgggaacagtctccgttataccctgctgactcactttattgctcataatcatcatttaccaagtgtttcagcagcacagaattgagatatacacagtgctcattaaagaaaattaaatattacagtgacttcaaaattagacaaataactgatttggtacaaggtatatactttattcagactcagaatgagttcgttcagactcaataacacctgcaataatcacctataaaatgggcatcattgtatatattaccaccaacataatctatcttagggggttattatggggggggggaagaattttcaaagtccctagtagagtttatgatccacagaagcaattaatgacagccgtttttaatactgaacaagtattcctataaaatggagttctcagaagccaacactccattggatcagcacccaccaggataaatcagatatggtcttgtgcaattactagagtattctttcttccaacagttcttcccccatgatgtatgcagtacagtggaatgggtgaccgcagtggctctagtgctcacaggtagagctatatagaccccagctcctccacttaccagccaagtgaccttagactttccacttgacttctcttcagtgtagtttcagtttctgtcaaatagggatagtgataatacctatgtcactgatttttgcgaggattaatgtgttgctgtgtgtacctggcacctagcaagtgctatatgattaagttgtcgtttaagtattagctggaatttaaagcaaataaaagctgtttacaggctgggtgtggtagctcatgtctacaatcccagcactttgggaggcagaggcaggaggcacttgaggcacttgaggccaggagttcaagaccagcctgggcaacatagggagacctcgtctttccaaaaaaaatgcaaaaaaaaaacaaaaaaaaaaaaaaaggaaaacgtagcctgtagcaccagctactggagggactgagggggctgaggcaggaggattgtttgagtgagcccaggagtttgagtttatagtcagctatgatcagccattgcactctatcctgggcaccagagcaagaccctgtctctctgaaaaaaaaaaagaaagaaaacattatttggtacaagtactaataacactgttgtaaaggtaagtgatatttaacaaaacctaaattttcgagaaaaaggctgctacaatacataggttggtgtttctaatatacattgttaaaaatgtcaccttgaaagatcttttaaatagaagcatttttattttaaacaatactaattttatctgatttcttcttctctgcccccctactgtgctacatgcttgtggttattatgtaacttaattcctatgaccacactctgagggaggagagcctgaccatttttccagactgtacagatgaggaactgaagccttagagaaattaaggaacttactcaagttcagaactggtacatataggtgaaaaacacaaacaggctccaaatccaggaatgtttataactgctatgttaaatgccctctccacttataaatggttgacgcgatgtcctgtaaatgcttaaacataagataatccctagctcctatagcaaataccttaacttctctaagcctccattttccttagatgtaaaaggagattcagtggatcagatggtccaagatgctgaaaactctagaatttaaagcaaatatttttacttcataagtctgattggtaaatctaggaatttacttatttagaatttaaaaataagtctattgtcttaatttgtcttaattcatttgggctgccataaaaatatatcatgaattaaatggcttataaaaagaaatttctcacagttctggaggctggaaagtccatgatcaaggcagattcggtgtctggtgagggcccactttctggatcatagatggtaccctcttactttatattcacatgatagaaggactagctagctctctggagtctcttttataagggcatgaatcccaataatgagggctctgcccttgtgacctaatcacttcccaaagatatcacctcctaataccatctccttgggggttaggatttcaacataggaatttttggggggatgcaaatattcagaccataacaggattgttctactggattctctaattcatattctaacaattataaatcacctatatcagtatgagaaattgttagatttggtattatctaattcaaaatttgaaaagtataaggatatttatccttatgtaaataacatcacagtatcacaatatgcaattcattacatttgtatttaaacacacaaaaatcagacaacttgctggttaattttctcttactttgttaattttctcttattctgtaatatttaaacattttatattaaaaatactatcactttaattacttattagccagtctcaatttattttagtaagtgtaaaaaaaaggggaaatgtaccacaagtcaacctaggtattagcaacactaaacatcgttggcattttgtttttattttcttcaagtcaaccaaacacgtataacaaataggaagatagtaatattggcacaatcttacattctttagcattcaattaacacatatgcaacagttggaagggattacttgctattatggtactgacataatagacagcactgaattcagtcttgggccccataaattatcctatacagccaagcctgcaatggtctggccaagaatgtgaatttggtagtggctgccaagatatgggaactgagctcttaacaaatgagcacattagggtagtagtgacacttaatgtagaaggaagatatccccacatttctggccattcattgtaaggttcataatctttcacatacactacttgcattctcttcataggactcagaactctgacatatttatttattccctaatttttagtttataaataataattgtgtatatccattgtacacaatagatatatatgtggaatacatgtggaatagctgaattaatatatacattatcgcacatatttttgtggtgagaacactgaaaatctactcctagcaattttcagtaactcaatacattgttattaactatagtcaccaagttgtacaatagatctcttcaacttattcttcttatctaactgaaatgttgtgtcctttgagcaatacctacctccccaatcctgcccaccaactcctaggcccttggtaactaccattctaccctctacttatgaatctgagtttttttagattcttcattgaagtgacatcatgtagtatttgtctttctgtgcctggattatttcatgtaacataatgtcctctgggttcatccatgttgtcccaaatgacaggatttcttctgctttaaggctcaacagtattccactgggtatatacacaccatattttctttatccatttatccattgggagacactaaggttgattctatttgttggctattgtgaataatgctgcaataaacatgggaatagagatatctttttgacatactgattttatttcctttgaatatatccctggtggtaggattgctggataacatagctccatttttaatttttaaaacagaatctccaaactgtttttcataatgactgtactaatttacatgacaaccatgatgtgtttattaatcatctatcaaaattcaggttccataacaggaggaattaacctgtcttaacctgtatacctagcatatgacctagtaaataacctgcatacctagtgtctagaagaatagtacctaacacattagagttgtgcaggatgtatttactgagtaatgaatgagatcgtgcaagtggttaaaaataaattactttctctgtctggataaattttattgctaacaccttgttcatagttattgtcctttctacctctccaccactaagatgaatctcctcctacctccatttacaagtgtatcttgatctgaaacctcttctagacaatgacggacaatgattgtttggtatccagcaacctaacctgctcctgagcttggcggatgtttgccctcatgcacacactcttccttctgcgcaaaaggcatttcagggtgattctacctctccttctgaaatttcctgtcttctcatagagcagatgctctcatttggcaacatgaactgtgcacatctccatcatgcttagagttacaagtttccttatggattgagagacttgtgtctcataagcatctttacctctcattaggagatacatacaatgtgcaccatgacaggtgtcagatgtcctcctaccctgaatctttgctttctgaatgaaaacctgggtgtcattcggtactgtgagatggacaagcccacatccacaacttgcttcagatgtcaccctcaccacacccctccagcccctgcacaaacctatagtaggtctggcaaggcccacatctaaactgcacatgaaggtaccaggcttaccatcaggcttttctacaacgcctctgtttccctccatttggaggtagatcccattgtgctaaatctgtgaggagggcaccagatggcaacaagctgacactttatgctgtagcatagttcctaagaccaaccttgacctcatactttgggagtttgtgagcacaaggtacacgaagtatcatatccctttgatggggaatgagccattagacaaatggtagccctgttgctatcatactggatcaccctagacttggattatcatacttcttagcctggctatccccccaccgtatcctaaatttcgcttgagatcatttgaaataggcctttttcttgacaactttgacaaatcccaccttaccccaaagaaatctatatctaggcacagaccagcgggccttgtagagctctatgggaaaagactgtcattcaggcacaggctcagtagtacctaaggtgcctttaaaatacagattcctgagctccagtctcaagaaattttgattcaggaagattcaggtgaggcctgagaatctatattcttcaaaagttcatttactactggcacttccacccaaccatcactcaactctccacctcattatgtctgaagtatattcatgttaggagctcattgacctaaactgcacacctatgagcaatgcagaaagcttcatcttgttctcagaataaggaaggacccattcattcattcattcatttgtgcattagacatgctaaaaatctatagcgaaatcaataataaaatacagttcctttgggcaggactgactacataatttatagggtacagtgaaaaataaaaatgtgaagccccttgtccaataactttttttttttttttttttttaagagacagagtctcactctgttgcccaagctggagtgctgtggcgtgatctcagttcactgcaacctctgcctcctgggttcaagtgattctctcacctcaacctcccaagtagctgggattacaggcatgtcccaccacatccagctgatttttgtattttcagtagagatggggtttcaccatgttgggcaggctggtctcgaactcctgacctcaggtgatcctcacaccttagcctcccaaagtgctgggattacaggtgtgagcaactatgcccagggaaattaagatgccttttcccccataaaatagggctcaagaaatattaagaatttcaggacagcaacagcagagcattaaaccaagcatggggcccatctgaccttgggcaaagcatgttcattttgagaatccacttatctaaactacattcctaggagcaatagaaaagacaagaagtccttcattttgctctcagaacaaggagatctcttagaactatgtccataatgctggcccagcctgtgtaggaagaaggaatctagaacattcccacctgagaaatgaaattccactagcaggcaaaaagtgatgagccaataaaaaaaaaattaatgatcattaagaaacagtctccatctcaatcaattctcctagttgaactagagtttgtacttctaatgagtatgcttaaaataacaacaacagaataataaattagcattctccattactttgcggttttcccaggtacaatagctttctagaagctataacaataaatccttagaaataaaattccctcttttttgagctgaccaggggatatgcaggtgatatccatgaaaaggaaagaacaacaggtcttcatttctacttaactcacaatagcttctaatatcctttctaatcttaataatacgcaaaagaagtatgaaaaatttcactgaagacagccaggttgaaactcgaattaatccaaagacacttaataaatgagctctttcatactacagaacattattcttgttaagccatttgtcaaattcatatgccaacatttcacattagtaatcatcgtgattctataatacagaattatgtagtttaagaagttgatggctattttgttgtatggatttggggatctataaacccaagtcttggtatttattcctatccttttaagattaaagaattaaaaaaaataaaggatgcatgccaaaagcgtgacagaaatgcttgctcttcataaacacagtgcttaacagttttttgtatggatcatgattgctgaggttattatattagctgccaaagtgccaaaggcttggttcttctacatttactgtttcattgttgttttgccttatttgtattcagacataatacttggcttcagaacattataaatagcaatcaacaaaattaaaatgagcacagccagcatacagtatgttgaaactgtggtagaggggaaacaagttctctaaacaaaagcacacacagagtaataagggctttataatgtttaaaaggtaccttacccagatattaagggatgttttctccttgcacacagaataggaagagccaggaaagataacctccctagcgccgcagccatttctagacggcacttgtacatttaagtttcttgctctgacaccatgtaagagtagcaaaatgtgaggccttcacatgtgactgtgcggtcaaaagaaaatctcactgactttcaaggaaaagtagaaaagggaagtatcaggtatagaatcacaattttacacactgaaaacaaatttacaaacgaatgcagtacttgtcaaatttaataaagaaaaataattttgctgaattgaacactatactttttggactatatacttttattgcagtccactgacaaatgtaatatccattcgataacaaaattccagtttatagattttctgaatactgataatataacaaaacctgtgtcgagttgttgtttcgaacttatcaaaacatctcatacataccttaaccagcaaagcctatatgatagttctataaaccatgacagggaagtatcttcagaatcattcttttaaaaatacattcaagtcctgggacttccaaagtggtgagcctggggtaagggccaagcatggtcttaaaataattttaaaactctctgggtgattctgaaacacagctaaggctcagaacactgttgcagacaaatggttctcaaagtgtggtccctagaccagacacgtctgggaacatgttccaaatgcaacttttgcagctcttcccacacatactaaattagaaactcactgtggagaaggaggagtttaacaagccctccatggaattctgattcaactttgagaatcgctgtttagagatgagttaggtcaaaatcatctgtcttataattactaaaacaaagctaccagaacttcagattttcttagatagtttctatattcatcatacaaatcaaaatcaatcttagacatttactactccatataagggcctaacagctgctactttggaaatgtttctacaggcaatcacttttaggatcttagcctccagctctttctcggggttagagcagaggtcagcaaactttttctgttagggttagatagaaaatgtcttcagctttgcagaccacacggtctctgccacaaacaagtgtcatatacaatacatatgtgaatgggtgtggctatgttccaataaaactttatttacaaaagcaggtgtccggccagatttggcccaagggctgtagttcttagaaactcctggatttaagaaatgatgatagactcatcgggaatgcaaaacaaaacacaacataccactcctcacccatgaaggcacactcttctatgagcacaaaacttatccaatctggaaggacagacttccttccagatgaaggacagactaagggaaaggagagaaggagaaagtggttcatttactcacttatccacatggtgaacattaagtgcacactaatgtttggaaccaaacaccaaagccctaccctcacagacccaagtttaatggaagaaaaatatagattggagatgaataaaaaaaaacaatgctttaatattgatcaaattgttctgagagtgtagggttgattgacaagatctgaagtagccatgaaacaggtcacattaggcctggatcttcaggaatgaagaggatgatgcctcttggaaaaaagggagaaaagtattccatggggagacaccaagtgcagaggcacaaagctcaggattaatacattcaaggaacaaagagaagatcaacatagctggactacaggtgacaatggtgagagaggggagtcataggcaaattggaaaatagggaaattggaacataggcaaatcgggatgtaccttgtctaagaagtctgaagtttatgtggatatgcagtattgtaaaagctggagactgtcataatcaaaacctgtaggaaaaaacacccaatagatcattctggctgtagcataaaggaccagatagagcactgtaacttcctacaatattaattgaccaaatataggtcaacctaaataacagagagaggctctctaaaaaaagaaagatattttagaatggagcattgcaacaggaatacactgccatggtaaaccatgtttatattcagggaggtaaagaaagacaaagttttaaaagaaagaatgaggattacataattgctttgacataattatccttggctacaaagatcaataacaagggtgatgccagtctaagtttgaactggcagttgctgggcagatgtccttgcagaggtattttttgtagaaggttttaatggcctttgtgcaaacttgtgatttctttggtcttttgtaacttttttttttaaatcaggcatacaagcatgagaaccttcccttcacagccttctgcaatgcttaacagacccagtgaaagatagaagttgattgaaccaaagtagcgactggtagaatggatgagaggaaaagttttacaaggcttttctgaacttgcatagacatactttcctactggatggaagagaaagagctaaaaaagattctccttgatcatttgggagactttagaaaaggtcagccttaactgagacaggaaatacagcaggaggagcaagcttggattacaaatataaaccctattctgttatcagtatgctgaatttcagatgtctggggacagataaagaagtggtcttaaatgtttatttcataaagtaacttgcatgaaatcactctaaaagcttggaaatagaatgcaaaccctactagtatttttaataatcaagttattacacacctattaaatggaacgtatttgaaaccagagtaagaggtcaaatgaatacattcttagagagttataaggagactactgcaagatttctcccttctatgttttaagtagcccctgtctgggggcctggaggaagcccactttctcctttactgataagtacttctggaaagatgaagacctatgagcaaaacaacaacaacaaaaaatttggtcctctcagcctttggacctcttttggtctactccaagtcagagtggtcctcccaagttcagcctcttcctagtctatctctagtgaaaagacgccaatgtcatgagagtactaatacccatgtctctgctaaagcaggatagtgaacaagcacaacttatatagaaggtcaaaggggaaaattcagccttcctaactgcaaggaatgtagtgctaacaatttaggttgtgaaaggagttggttaattgagaaaaacagacaccacatatcacagagcccagcatctggcgtgcagtaaaatattcaataaataaatgaagtgactctgtggcacatacactcactttctcatccagtcttagagcagacattttccagtttatttaagccagaagagatgttttgtcagaataaaccagtttctcggaaaatgacaacactggtgtcaaaaagggttcacaggacaggtaccaaaaatattacctgtaagttcgggtgctaagactatagaatacttcattccttttgaagacagatccctgtattttctaagttttctgtaggataccaaaaatattacagcaattaagtttgggtggaggggttatgatttcatttctttggggacatgtctgtgtattttctaggttttctacaatgaaagtacattatgtttgtaattaaaaataaaacataatttagagaaggaggtctatgtgctggcttccacctccactactacctccttagtgcaagttaccaatgtctcctgtctacagcaatgacctctttcctgatctcccagctttccctgttgacattctccacatagcagccatagtgctcctttaaaatgcatcctccagtggcttccactgcactttaaaaattcagtctctatagcccttgcctatctttttaaacttatctccttcctccccatctcccccacaccctagtccctacctcactcccacccccatactccattcctgccattaccccccccccacacacaccccctccggtctgaccacactactatatatccattgctagagcaaaccaagcaaccagaaacatgtccccagacttcagctccattccaggttcaaatcatacatcatttcctcagagagggcttccctcagtgccctaccagaggtcacactctatactatttctttgtctgctcttcatagcactaagaaatgcaaatatacagattccaactggactttcacatttgataaggtgtctgccatggccctcacttaacctccattgctgagctacttggcagaaacaatatcacagagaaacaatacaaggctctgcctcaaacttcaatatgtgtctgtgttctcaaattgtattcctagcagtgacaatctgaaagtcactggctgggctagaagctaactatacccttgaagatgacacagaatccctggaacttggggcatgaatatatcaatcctagaactaatttcatttttctggcatcttgcctagactacacatagttaatgtttgagtatttccagttctctgtaggtacaattatcttttcattaaattgctaaaaccaaagctaggaatcatttaagtaatggaaaattcctttattacatcaaaaccaatcagtgattagcactaggactgaaacctatcatgctatacaaatatagctgaatagctatttttagactgttataaatttgatggagggaataactgagaaagttctctatttgatggtgatgatgatgatgataatgatgattatttagagacagggtcttgctctgtcatcgaggctggagtgcaatggcaagatcatagctcactgcggcttggaactcctgggctccagggatcctcccgcctcagcctcctaagtagctagtactacaggcatgtgccatcacattgggctaattttttaaattttttgtagatgggatctatatagcccaggatggtatcaaactcctggcctcaagccatcctcccagcttggtctcccaagtagctgagactacaggtgtgagccgtcacaccctatagtgatgaaccctatagttcatcaatacactgaatatctatatttatgttattttgttatagtaggtataatttataggaaaaataatatataacttttatagtaagataaaaacatttctgatcatgtagccatctactgaatgttcttgggatatatgctggtcccagttttgagaataaacaagctatatagctgaactatgttcagatcctaagcactagctgagtccatctctaaaatagtagtagagaaataaagaggcacacaaaagttcttaatgaagcaaaaggcagggaaaacacattagaacagaagttctaggactatttgattgttaaaagggaattcattatatttcaaccatgtgcttcacagactaactgcctctaagggagcttataaaatctcagttattttctaactgatatggaagagacatggagggtggatagtggggtctgggacagattagggacacaatatgcgatggccccaccacaattctcaccccttaaaatgggaaatataatgacttgccctggaatagttttactcctcattgtgtcacagttgggtgacagaggaaagagggagagaaaggaacagaaagtctctctcatattcagatgcagaaatcactttttcctgttttcttcttatgactgatcattacggcactactctgggtcactgctgagtgtggtactcagcattagaacacattttatgtctaactagaataggaatgatcatcgctggttggggacttaccatctcagacaatgagaccagcacagacaagggaatggaagacaggttttcctcagtaaaatcctggggctttgagagcttctgagatgggcacttcttacgttaatttcactaagggacacctgggtgggacctgagtggctagcagcatgaacaggcaaagatcagaggtcaaactattaacaccagagaactcagacagcttttgtcttcccataagtccactgagggctcaggaagtggagtgctactaatcatgctggggtgttgacacacaaaaaaggaagaaatgggtttctccaagcttctgggtaagtaatcagacttcaaagaacttcatcccttttgtagaacaaagcttgttgactgtatgtgggttctagtccctacagaacaaactagaaataggaatttctagccctatacaagcttgacccctcaccctttcttactaggggatgtgtcctcaggtttgtccccttctagctttgttagaatttcctgactggttccaatcatctttaactcttttcagggctaagacgcacctcccttgccttatgtacctgcctgaatttcatatatcaggcacaccttcatagacctgtgcagatctgccacggcaagctacggaaatcagcaagtacatcagcgaaggcttggattaccagttataaggcaaattttgaacatattttacagtttgtctataaagatactgtcactcattcatggttaaatgggcctgccagggtatgcgtcacaaatactaaattatgtttaaaagaaggctttaaaagcaatcaactatccagaaattccaacttttttttccagtgaagtattcaccactcaacaagtatttccttgtcttttttcttcctctgcatcactgaaagatttttattctttttatttttgttttgataaggaaaaatcctttgatgcctcagagaaagaatacagttattattttaaatgagttgtttttagtaagtgtatatttgagcatgaaacaagtctaataccaaactaggaaaaagacatttttctgccccatttgattatagttgctaaatgttagacaatacttgtagacctactactatcttattaacttgggatttacttggaaaagtgctttctcttaaaactgctaaatctgtgaggatggcaaattaatagcaatggaaattgtagctatgattacatgacattttggacaggttttctttggtggcacagagttagatatgtttatgcagctgctcttggcttcagttcctacagacccctcttttgctttttttcttttatatgaggagccatatgaagatgttgactttccacaatttctatcaaaaatgttattttgcaaacacaaaactacactttgaaaatgtttctttacttttaaaccaatgcctgattggagaagccatccttttcagcacccaaaaatgacgagtactaattttaaatttttgtttaaacttgtgtctcctatttattccaagagtaaaccctgaacacgtttggggttgtgttgttttttcttaacaaataaccagataatcatagtgcgactatttcctctactcagtgtaagttcaacgctgaccaaggttgatgtgaatgtcaagattagtttttctctcttggctgtaactgaaatcacaatcatctcgaaaaggctattatgattatcagtttacctacaagcataatgtaccttttacaagaatatcccaggaattattttttaaaagagaaaagaaagtacccctaacctcatcttgcaaatggagacttaaatgttaggctcaaggcaaaattctaccaagtaaattttagaggcaagacagacaggttagtaagaacactaatgcttgtctttaaccccaacctgaaaagattttttaaaaatcacacaaaaagtcctcttccccagtcttccttaagaacaaactagtagagtgagggcaaggctagtttaaagacctttcccagctgtatatttcaaagctgatatgcgttgcaaagagaaaagcatgcaaagatgctctccttaccggaggtgaaagcattgtgccagctctgtcactactataaccatcttccgcaagtggagagcagggaacgccagggtcccaagaagtgacgaaaagcgataattagatctcctgcaagaatcttccctaagcactttcttccgtgacacacctactttgtggcatctacgcgctcttcacggctaaccacaatcctgtcatttcggcttattcatccagcagctgccggaaggaccgggctgaagcgtggccacgaggagggggatacccgtgcgagcgctgagccggcagagcggctgcagcccacgggctcctcggacccccgctgctgcgccgctgcagctgaccgtgcgaaagccgcatgttattgggtagagatcagctttccaggaacaggcatcagctgtgcacgagcccggcagcatctcgagacaagtgctagccggtgttggtgcaaaccaaagcttgctatgtgctcagaaagcggccccagctactgagcatgctcggcttcttcccagctgctgttatcagagccccttaactgttgacttctgttgatttgagaaagggagaatgaaggagtgggcacgagggtgcgattcggtgaaggaaataccttaaatttggaaatgatctcttccgtatccccgcgccccttccccaccgcaaaaataaaatttaaaaaacagagtaaggatacactgctctgcacttaggaaattttttattgataggatgatagagatgtttgaaacctaccagcagcttttagtctttagctttctccctgcccaattaagttgcctccgggatcaagcttgtggtgtaaactgcgaaagggtttaatcctaacagatcactgttcctcgaggattaagtacagaattgccttgtgtttgaagatctaggcaatgtgccacaaattaattatctctgtaccatcataatctgcctcctactagacaacaactttcttaaatattttataaagtaattgtgctagttttgaaatggaaatgttaacctatattataacatacatcttaaaatttaagtcttccagatggtaagcaaaatgcaagcaaagaatgcctggctgattcatgactgtaaacataaatcttttcttgggggcttggtggacggccagtactccataaatgttcccgtgacgatgaattggtgaactgatgggttagatcatctgttagtggcgcttacaggaaagctgaagttcttgaatttgctatggacccctatactaactcttgaccttctcagctattttgggctggtcaattatttgaagatagaaatacactatacattaggtgtgcaatacgtaagcaaatggcttttaggtgctatttacattttattatttttcttatgcctccttttcttcttttttcggccccctaaaatgctactttccaagttgagcctcattcagagcacgccgtctcagctactactgaaaccagcaacattaactctccatggtttgcagataacaaaattatttcattttgaaaaacttttagccagtcatctctgccaagtatgtggagggttaatctgagaggctttcacagctgaaagctgggcctgtgagagcccacacaggacacaggtgaggggaagtcaggtattgaatccctagcaggtgtctggcctggcccatgaatccagttccttggggcaggaaagtcctctctttcttccctttttctctgccccatcctgtggctcttttatttgttttttttgagatagggccttgctccgttgcccaggctggagtgcagtggcacaaacacagctgagacaagtgctagctggtgcagtgtcaacctcccgggctcaagcaatcttcctacctctgcctcccaagtagctgggactacaggcacacaccactattctgggctgattttttttttttttttttgtaaagatggagtctcaccatattgcccaggctgatctcaaactcttgggctcaagcgatcctctctccttgacctcccaaagcactgggattacaggtgtgaaccatttatacctagccttctttctgtccttttaggactcaagtgctacctgagtacatcctgactccagagcaggcccactctggctccccttctctgtagcttttcagtgatactttcttcattgtctttagttgaatcataccccaccataccagcagctttgaatttcttaagggtagagacaatgctggttttttggatctctatgtataattgtacatatataattacaattataattgtataattgtatacatctgtgcagttactggttttcacatgttgtcaatattacatggagacacaggaggaagtccttctattgtaatgaccacttagaaaatggacagagttagtctagggacatttcttaaaggaagtgattgcaggaggagaaagaaccttctcagtataaccaaatcaaagatttcataactggaaaggaagatgcagacctgctaagagcagataactaaggtggggctgttttataggttttaatccctacttctctgtcccgaacaaaaatagaaacagaagtggggagacacaactgctcctgctatgggccccatggactcattcaaattcatagcagagattccttattccatctacctcatttaccatctgccatttttttcttgctatttattatattgcaatgaacctggttctgaagggttgcccaaggtgttctaatcaccaaagccaagaatttctcagttttgatgacaaaaatcataattatcacttatttgcaccttattctctgccaagcaccactaaaatctttacaactatcacatttaattaccacatgaagcatttttagcagcatttatcacaatcttacattttgaatttatagtatacaataatgtgtttgctaacatccaaaccatacaggcacacaaacaataattggtaatggataaggacagagaatattatctttagctgctgatgaaaccaaggctttgagagcccaaggtaagatagctaataggtggagcacgatatgaattccatcctgtttggtgccaaagttcaacagtccttaaccagtctaaattatagccttgctccacaagagtaacttttccaagaaaatatggctaaagttgaaggcaggggccaattccaagttgacttgatatcactggggctcagaaaccaatacttcaaaatatagcacttcaacatgctgaaccgaaagagcctcaaggtctgacctttcccaccccacctctaaccatctctcccaaagcacaggatggatctgaagttcctttatctgtttaacatccagatccatcaaggagaatagtgggttttttttatttccacctccccacccactgcccgcgtaagaccaaaactgtaaacacacctgaacagacccatcgcaagataatgtctgcctcctaagatcattccgattccaaagtgaactatttacaggttaatttctgtcctcagagtcattcattctccctctgatacagtttggctctgtgtcctcatccaaatctcatcttgaattataatccccatgtgtcgagggagggaagtgattggatcatgggggctgttttctttcccccatgctttctcgtgatagtgagttctcacaagatctgatggttttataagcgtctggcattttccctgcttgcacttctctctcctgccaccatgtaaagaagacccttgcttctccttcatcttccaccatgattgtaagtttcctaaggccaccccagccatgtggaactgagagtcaattaagcctcttttctttataaattacccagtctcagggagtacctttatagcagtgtcagaactaatacactctagtaatcctattgcctcttaacagaattcctcttcatcctgttcccataaccaattttgtcagggtggtatataagctttgaaacccattggatagtatgtaatcaagctgtggttctcctgtgtacatgttaataaattctggatgcctcttctccaactaatctgccttcctttagttgattttttttttttttttagtgaaccttcatgggcaaagggtctgttttctcttggcccctacaatgccaaacctgggcttaaactctgctattctgtcccactcctctacaaaattctttcctcttttgaattccttgacgtcacacttttctaattctatgcctttcttgtttttccaaaaaagttaaggtttccttcccattcattcattcatctcattgttgctacttgtaacaatagttatcacttcttgtgacttctgcatttctgtctaaccagtcaccctgttttaatttcttactcttcaatccttcttccaaaaaaaccccaaagtctcctaaaatttcatttaccattacaattgagaaataaaaataaaattctaagtcatccagctgacttaatggaccccccctcttggccaaggggaccccaaagaaaccttgaaaactgagtttccagccatgatgggatgggaggtcagacaccttgttatatcccctccctcactaactgccattaggctttcatccctaagggtgaaaaagaagccagccctctcaaaagactctaccactgatatcagccaaatgcctggagctgccctttgtggtttccacaaaacaacagactagcatgtcttcctgataagagacaaccatctatagagtggtctggccagtctacagaggatgcacgatgagggttttgatgttctctgcttcaccttttgacatcagagggccagaaactctacgctcggatcacgctaatgctgccattttttgtagatgggacccatgaagaggcatgaagctcaactggatatgcacattcttctcctttcataagtattcgtgactcctatggtttattgaatatatttatattgaatatatttgctcaccccacccagcataaactccttttccctttgcccctccctcaagtatttgtctccagctcctgaccagaggctacacttcccagcctgtcagaatggccacctgcaggctacagccctttatgaaaactaaagctctcctttctaaatttacaaacctcatcattcttcagctgacacagtggacattgttgattgtcttgagagagttggcttttcttctaatagatcccaaattaagagtctttatctgttcatatccccaaacagtccatttgctcctggaaaagttcactagtctgattctcattgatctaatagcaacgccaaactcttgccattcattggttaaggaatgggtatgtaaaccaattttaactgatgaaaaggccaggaaagtttgtggcaggcttcagaaagcttcttcccttttctttagtggatttctgagattccctcttatgtcttacatttaaacaaggaagtgtacagcccctaacactactagaaaccatctttacaccttgaaaagaagtcaacattgtacaaagtgaagagcagagatttaaaaaagggctactggtgataccattaaattgatctacccacccaaatgcctacctcatctcttgatttgttggattgtgagccaatagaatctgcttagaaccacttgaattgggttttctacttacagtcacaaagcctcttgtctgagatatgcatttttttctttcctattcaaaatgctgaaatgattaggaataaactaaattttgtggtatagcatttgagagtttgttcctggccccttctgtcttggaaaatttgtctcccattatattctgctatgcacttgacactctggacatgcttggctgcttgatctcaccatgtcatttgctatcccacaggcccctgcttgtcctgtattttctcctactgaaattcaactcttcaagatctagagtaaaagatacttccctctgagatagattttcaaaattagtattgcttctttttatatattcatacatgttgcttgtacttgtgtgtgtaaatctgggtcctccaggagccagagcagccaggatggaattaaactgcagcaatgatgtctgaggaaatgtgtgggagagaacatgaagacagccaagggaggctgggggaactatcagactataatgcagtgaagaagagagaaaagggaaagaagctggatgcagtatagttatcaggaaagttcagcaagggtggtggtaaatcctcaagccagcctttcttcagaagagtctggcttcttccagaaacaggctgccctagtatggctgccactctcagtcgttggctgggagcaggctacaggaagcttggtttcagtataaaagctgtgatgcctgtcatgaggggaccttgttcactccctgcagctttatactccctgcagctttacactacctgcagctggagggtaggaaggtacttgctcatggctgccatactctttatttattactcgttcagcctgtcctaaattctacatgttatttacatgaatctcttccctgctggatataaactccttaagggcaggacctggattcatttttttgtcccactgtgtgttttccatagtatgattccagtagactgctgctgtgttactgaagtgcattctggaatatattgcctcagacctctatatttgcaattccttaaaaaaagaataggaataatacaccccctaaagtcaatgagaacttgctttcataagatgtaagatattgttccatgattaatagttttaaaaagtttaattcagtcatactcacctgtcttctcctacagatcaatgtgtctccacaaagaagtttgattttgaaatttcagcattgatgaagtagtgaagtagagcatttgctgattaatacccaatttttcacaaatttaatccccaaggcaagtggatgattaaacttggagttaaatttataatgcactttagtttgggctggagaaaattatttcagactggtatgatacactctactatttcttcaacattcatttttaggcgacatgaaagtggatctttcaggtacatttttttcagataaaaggaagattaatagtggtcactgaggaataaaggagattagaaaaatctgtgattatttaaggtataatatgcattattaagcaaggaggaaaagcacataaatacaggtattttgtcacttcattatactttgtaatgttctatgtactatcaatttagggtcaatcaatttatctatggttaagatataataaatagtgcttgtataagtaatggtccaataacgagacagaaaccacacagtaatttgaaaagagaatgcttaatataaagaatcattaactatttacagagaaaattacaaaaagggaataaagataaattcaagaataccccaagactgagtgagtttacccaaggaaggaggccctctccaacactgggactcagagctctttggtgtggttgctgtcccctggatggtggagaagttcactgggttgcccaggccagagctggtccacaatctgcaggctgataatcacaagctgcaagtctcctgctgaggtgctcatgggctaagctagtaggcaggacactgccttctgggatgctgatgagattttgtggggagctacctgctgggctgctgttgaactggctgcgaagaagctggctgggtactgactggaatcaccagaaaaccagagtcacctgcaagaggttttgttgaactgtctgggcacccacagaactcaccagaatctacctgcagcagtgtgccactgaacatactgatgtgaagctagctggggtgactgtagagctcatccagaagctgctgctaggagaatgagatgcctggagagcctgctaagatgactgcagccctcccctggaaactgccttgggaagtactgctgtatctcattcattactggaaagcctgctggagcacttttggaaccactgcaagacttctacagcggtgctgctgaaactccctggaagtgagcgccactgggtgtcctgaatgccagtccagcgctgcagaagcaagaatgctggaataaaaacaccggaaccaggaagagacatcccatcctcccgcagtgtccctctagcgccctctactgacaatgcctagcatcatgcctgctggcaagaggaatgcttcttcagtgtcaggcgataaaagaatggatttggagctgagaggtaataaattgataactgacacagtccttttgtcaaaatcacaactttgtattaaaatgctctctttctcacttgtctcttccattagtaggtgatatgtgtttcaaaagtgaggatactttttatatttcatgtgtaacacagctcctggcacatattatgtatttaccaaacatttgtgaaaatgttgtactgaatacataaatattgcttcctgtgctaaaagattcacttggtctgagagcactaggtctgtacaaattagatggcataaagggaagctgttgttttcattgtttgtacatagaagaaaaatggcagcagtggtgattgacacatagcacacctgtagagtcactattttctaaaagtgggatttttttcagtcactaggaatttcagttagggttgaatgattggaaatcctccataaatctctaggggaaaaaattctcctttattgagcagcagtacattctactcagaaatgtactgtgaaaatgaaaaaagcagttatactagtaagctgaatgatgtccatttcacacaaactttaataacatggaaaaatgaaacaaaataaaaactactggaatatataacaaaagtttattgtgcttaaatatatatcaacaagacccgtttcttcgacattttgatttaaggactgaatttatgttgaaggttgaattacttgaatgagtttgggagttgaagaatagagagatgaaattatttagtcaatatcaagcatcaaataaatgcctcaagtagatagaataagaataaaagagaaagacagggagatttattttaaggaattggctcacacaattgtggggcatgacaagtctgaattttgcagggcaggcttgcaggccagagactcatacctaatatctcaatttggaggcagaattccttctcccttgggagacttcagtgttgttgttgttgttgtttttctttgtttcttttttgagatagggtcttgctctgtggcccaggctggagtgcagtggcgcaatcttggctcactacagcctcaaacctcctgggcccaagtgaacctcccacctcagccccctcgagtagccggtaccacaggtgtgtaccactacacacagctaattttgcttattttttgtagagacgaggtctcactatgttgcccaggcttgtctccaactcctgggcttgagtgatccttctaccttggcttcccaaagtgctattacaggcgtgagtcactgtgcacagctagtgttttttccttaaggccttcaactgattggatgaggcccactcacattatagaaaggtaatatgttttactcaaagtctatgactggtttaaatgttaatcatatctaaaaagaaaaatctagattgatgactgaatgtctggggaccataacctagccaagctgacacataaaattaatcatcacagcatctaacttcatttgcaaaatcaccttagcaatgaaaacaccaaaagctgacaaagataattgagacagagagaaactattagcgcagtgtattagtctgttctcacattgctataaagaactatctgagaatatataatttataaagaaaagagatttaattgattcacacagttctgcagactttacaggaagtatggctagaggtaggcctcaggaaacttatgattatggtgggaggcaaaggggaagcaggcacatctaacaaggctgaagaaggaggaggagagtgaagggggaggtgctacacacttttaaacacccagctctcatgagaactcactatcacaagaacagcaagggggaactctacccccttgatccaatcacctcccaccaggcccctcctccaaaattggggattacaattagatatgagatttgggcagggataaaaattcaaatcatatcatgcagaaataataaaggaaatagtaacatatagaatttaacaaagcattactggtataaaatattatgaccaagtggagttcattggatgaatgaaaaattgggtcaatattaggaaatatgtttaaatccctacatagattgaaagattaaatggaaattgaacatgtaattatcatagcagaagcttagcagaaccatttttctggccagaggaattgagaaaagggaactttaggagtctgagaatgtgggggaatccctgaaatgagagagctgggcaagagaattctctaactatacaaaaaaatctgacacaagcccccacttatagcttatctctgcatgtgcagaacatacccaaagaagcacagcaaaggctttgggaatggaactatgatataaaacagggacaaattcacagactggcccatgcacagggtggattcatacagcatagcacagctttgagaaatgaacttacagtggaaccatagtctaagatggaacttttagtctgaacattgactgattgctgacatcagttaacattctccacaggagtttaacaggaccgagtctcacaatataatattcaaaatgcctgtgataaaatacaaatgtatgaaaagtatcacaaaaatctaaccaattaaagtaaatgttcatctacagatgccaactctgagatgacaagatgctagagtaactggacaaagcccactattcaggaatcaaatagactgaagtgttgatgtactcaatagagtggctaaatctcagttgcacgtgttaagtgaaataagctagactaagaagggtacattctgtatgattccacttatatggcattccagaaaagacaaaactacagagatggtgatctgttaaatcagtggatgtttacagttaggcatgaggggagggacagactaccataagagtcacaatggaatctggggggcaatgaaaagttctgtatcttgatgttggtgtgattacatgactacctgcatttgtccaaactcagaatgtacagcaagccaggtgtggcagcacatgcctgcagtcccagctatttgggaggctgagatgggagaatcgcttgagcccaggtgttcgaggttgcagtgagctgtgatcacaccactgcactcgtggtgacagagtgagactctgtctctaagaaataaaataataatttttaaaacttagagtttataacaaatagagtgaatttactttatgtaaatttaaaaagaaatattaataatttttttaattactctctttcatgcttctgaagaatgattgaactctattgatgcatctcccatcttacatattaatattgtggcagcattttcatattcccttgtttttatagctgcaaaccagtcatcacatgtattattattttatacctttaatcttttgtttttaagatttatcaagatgtaaaaagttcttttctactccttgcatctcatttcttcctgaaattaatgttctcctccctgaagtacctttcttaataattcactcagctccatttgtaatttctctcatgttttttttatcttaatagccattcattttgacctgacatttgaatgatagtttatctgggtataaaatctggtttctcagttattttctctgaatattttgaatatattatttcactgtcttttcactggtattgatgctgtttataagtcattattttgccacattgtttaacatcttctctctgatagtcagtcatttatctaagtgtgtacgtagttttgctatcctgttgagtacttgatttgacttatgaatgttgggttctatctttattaaattctgaaaacttctattttatgtcatttataaaattttcctcttttctattttctctaatgtcttcttatgtaaaaccagttatatgtatgttgaactttctcattctgtctttcatgtcttttcatttttctctcacattacctattttttatattgtgttgctttcatcttctcagtacaatttaccaattcactagttctatttataaatataatcatatgtttaatctattcaatattttaaaaattctagtgactatagatttattttctacaaatccatttctttttgttcttaaaattacctggtaactttcatagtgatttatacctttctcatattcttgtttatttagtttatactactttaattatttaaacataatcattttatagtttgtgcctgataatcttattcttgatgttattcttggggtttaatcatatcgttttttttctctgctgactctttttgtggtgcattgtttcctgtgtgttttagaattgtagattataaacttatcttcccaggactttatagtgtgaatcctatgtaatgtgatttgacataccacaggattctaattaatccaagaataaaatttatgttaacgtatacagttaccagactacagagatgatggaaattcaaacctgaaacctgtgtaattgggttcatgatcataaatttataagaaatgtttttctttcttgatttttttcaaccacagccctggctaagactaaaagttttcctcatcacctacctgtgctacggacagataatttttagtctactcttctctatgtatgtgtataacttcaattgcttatctttctatagacccagttccttacatgctatctcagcatgaaattatgttcagttaatttccaagcctctagtttatcaagattcacatgaccctctcagaagactgaagtatcaactcacccttaatcttgttgtgtacagttctctttacatgtttgtcttctggagatttctctcacttttttgttaggatagctatgtatttttaaattatatatgctatcttttatccatcacttctatgtatttttatatgaaagatttttagtttatgtagactgccctattttcagaaaaccttcaacttcctttttacattatatttaaatatattaatttgcctacatttttataaacacaaaatatttgatattaattttgaaggcattttaatggcttcagctcaggacaaaaattacataacatggccaataaatggttcatgttaaaagactaaaatcctaatcacaggttaataaacaatgtagtcatctagaatttttacaaccaatttgaagaaaacactgaatacagaaatggtcaataggataattgcataaataacttgtcttgggataattgtgtaagtaacttttcttcacaggcaaaatctcttactaatagatcctaattctagcaagaaaattgacataggattttgaacatctactgtacaaattaatggttttggatgtttgctgttcatcaattcttagagacataaaatgatttagcacaatgttggcaggcctgcacggaaatgagtaaattcttttatggctgatagtaatataaattggtgccattttttctaaaaagcaaaagggaagtatgtaacaagatcttgaaaatatatttgtatcatttgacaaaaagaattctacttttgtgtatacagctttcctttttattcatctgtttttttcttcctttgttcattgaccaacagtatttaggaagctgtttgtatggcaaacattatgattattctgtggataaaaagataattcagatatgtttctttcccttgagaaaccacagacctaactgtgtaactcacttctcctcctactttcacactcccaccctgttccccaaagacatgcattatctacaaatatatgttaaaacttgatagtttattacggccattttttttcacataagctccttcaatattaatacaaagaaatataatggtaacatgaatagtgaatatgtcagtctacttcttctatgagggagtaatacagtccacaattaacctctaaccatagatatctaaataatggaaaactaagaaatatcttttagtatttatttttcatttaaacatatatattcattgattataacatgatattttgaatatgtataccttgtggaatggctaaatcaagctaattaacaaactgtcattttttttatggtgagaacactttaaatctactcccttagcaattttcaagaatgtaatgcattgttattaactatagtcaccacattggacaataggggaaaaactatttttcaacattggagaacatgccacacaggactgtgaattctgaggtgaaaatattgatattagacctcccatcacctacactttctgcccagaggcaattctttatagtgtagataggaaaacctaaacagtctgacaattattctgagttgaatagaccagtgtcgaagatataaaaagattaaccaactagaattcatggggcagattacccaaaaatcacaggtacatggataaaatgtccagaaatctaagtatggaacccttgactttttacctaaataccaaagtgtttttacatagagtgaatactccataagcccagacaaaaacagctttcaagaaatgaataattacttacgacttgtaaaacaaaatttccagagttcacagagccaggaattaagcactcacaatccaagtagagagatctcattgaagacatgaggcttgaaggagcttcatttcaaacttacaataatgactactctagacacaacttaaaagagcttaaatggccaggtgtggtggctcacgcctgtaatcccagcactttgggagattgaggcgggcggatcacctgaggtcgggagttcaagaccagcctgaacaacatggagattacaggcgtgagccaccgagcccaagattgtgccattgcactccagcctgggcgacaagagcgaaactccgtctaaaaaaaaaaaaaaaagcttaaaaacaaatctcaaaggcaatatgctaatcaaaagaaacttgattgctttccagaaaataactagagtattttaaaatacaaaatccagcagtcgacaacgtaaaattcacaacatttagcatcccatcaaagctcactagatatgaagaagggaaatgtaactcacaatcatgagaaaaaaaatcagttacgaaagaaatgacagatgatgaaatttgcagaaaatgatgttaaaatatctattataaatatggtacatgtgctcaaatatgtgaaagatagtagaatcatgatgaggagagaaattaaagtatataaaaaaatggaacgtagctcctaaagatgaaaaacacaaaatctgaaatgaaaaagacactagagggggtgaacagtatattagacactgcaaaaaaaataaaaggttagtgaacttgaaaacctagcaacagaatctattcaaaatgaagtacagagacaaaagacagaaaatagtaaacagagcagagtaacatgtggaacagtatgaatcaggctaaacacgtaattagagtccccgaaagaagaaagcagacagaaaaacaaaatcactaaaaatgtaatttaaatgcagaggaaaaattgtactactaactagaatctttactcagtgaaaataggtttcaaaaatggaggtcattcttccacagttcaggtctctgaaaaacttccatctcccactgaaagttgtagtctaagagtgaagccatcacatacaaggacttcagggctaactgtaaagtcagtctgaacacttgcattagttgatcttatttattatcacaagcctgaaaacacacagctctagaaaaggtggcctccttatgcacatatataatttttaaaaaggagaaggcactttgtgaggctgaagcaggaggatcacttgaagccaggagttgaagaccagcctggacaataaagcaagactctgtctctacagaaataaaaattaaaaataaaaaagagtgcaatagaaaagggaacaatcagcacaaagagggctgaaatgtgcaacaaaagtcagcacaatgaaaatgatgaataatgagccctagaattcaaagagatggggtaccagttttcattacattctgaacaacacattaaaaatgaactatttttaaaaataaaagtgagggaaaaagaaaaggaatgtcaacccattgattgagcccttcattttctcttaaaattgtttttgatacataatagttgcatgtatttgtggggtacatgtgatagtttgatacatggatacaacgtgtaatgttcaaatcagagtgagatatccatcacctcaaacatttatcatttctttgtgttgggaacatttccaatcttctctttgagctattttgaaatatacaatgaattattattaactatagtaaccctattatactactgaacactacaacttaatccttctatctaactgtttttttgtatccattaaccaatccccatttgttcttgataaagttgaatcaaatcttttgtgaacacacattctcaggtcttttgggatatgattatcagcaattctctgaccttcaaagagaaatctgagtgaattcactggaactcccaacactggcagtatacttctctgggtttcctgagatgtgttgccatttccactttgaagtgaatcttacggctatctgactttaatgtattctccttccttcttattccccaactcctcggttaaagaatttgtctcctggtcagacaaggtgatggtggcttcattcagtggtctcctctgaacagtaggtaccagcctaggatacacagaaccttgctccagggtttacaaatccacctctcttcctcacagcacaatcaggaaaacaccctttttaggtgggcacaaagacccaacctaagctaatgaatctctttgtgctgggtgtttgaatctgctgtggagatacaataggtaggaaaggaagtagagtgactcatttcagatataggtgtgcatgagtttccactaaaatgtactactggtacctgttcccaggagtatgtaggctctcttcattgggtactttgcaggtatgttcttcttgtagtctaaaaacatgccaatttccaaaaaaaaaaaaaaaaaaaaaaaaaaaagtgagaatggggtagcctcttaactaaaaataagataatactatttgttaaaaatctaagatgtaaaacaggccatatacacaatctgtaattataacatctctacaaagtttatattatgatattccttatggcagaatgcaaatacttaatcccttttgcaccaagagtcttatgattctctctccctctctccctatctgacttgctgttcattctatgattttgtccctgtgtctctcagtttcatgtctcctgactcagaagtatggcacatctttgtattttgtcttgtattttgtctttagtattttgtcttgacttattcatagatactccttaatattgcccctcccaggtcagactagccctttgctatatttttttctgactgcaagaggcatttgttcattcaataaacatccattaagcccccacagaattctaactcagcagtgagaaaagtagatctatggacagtacagtgcttataacatttcagaacgagtgcttctcctctggccaaagccaaagtctattagtgagcttgattaactccttcaccttaagtcagcaagaaaagatgtagcagaatagcataagtgaggcagatgacttcagtgacagctgatctgagcacatgctttggttaaattctaactttataaatatttattgagcatctaggcagaagccgggaatgggagtatggtggtgaataaggtagacaagatctagaccttactggaacatacacttcagtaaggcacatggacattgaattagtgggtgatgaaaatcttgtaagttgaaatgaagggcacttagcctagtgaagagtgagggaagatgattccaggcagaggaaataaaactcacgatgactcagaattaagaaagagtttggaatactgggtgaactgagggtggatggaggtggtggtctggaacagggataatgggttggcgggggggtggtaaacaggtggaaaggtaagcttgatactgaactgggagcctctggggtcttgttaagaatttaatttatcttgaaaaacaagggaatctttaaagaatttaaagaattttaagcaggtgagtaacatgattagatttacattcctaacctaacacagtggataaaataagcagaataggacacttttgttcaaatatggcagatggaacgtgtacacctctaactgctcccccagtcctttctaaaatagcagtaaaggtattttttaagaaagcagaaatcctaaatgacaaggagaagaggaaaagtgatcccatcaataagattttggaagctggagagcagatggccaagtggtaaaggatttaacaggcccaagaaaaccaaaccaacagtggaaaagcagagaaccaacctgatttatacattagaatcccccaaagctcagcagctgctgccaccagctgcttctaaatgtagacatgacagggtccaaggaaagcaacagagtcaggagcattggtctaatgtctgtttaagaagcagtcagtctctgttccatgtagctgggccactgtgtttcactcatcctggggaaaggctgaaggcttattctctggaaaggaggtttctggactagaggacacccaagcatggccaagaagaaggagtaagatagatgttgtcaacagaccggtactgagacctggcaacttaattctccactcctggacagctaaaagccaagcttttgttcataaggcaagaatgtggaatgatctcctttaaagaaccttttcagctcagaagaaatgtcctaaaaatactaacatcagaggctccacagctgctgttatggcaaatgattttattgttatgaaagtatttagtgagattttattttcccccaaataggttcctttaaataatgttatattaaaatttatattaataattataatttagtttgccttttaacatttatatgtcattttgaatattttagaatataacttttttgaaaatatataaacaaaattttaatttacatatttcatgaaaatacagtcatttcatattcaatgaagttaagctcactttaaatataattgcattttatttcttaatcctttagtaagaatgagtttaaattgagaaatagaaaatataaaagtagagctcaggggaaaactaaaaagcataaggaaataaatgttcaatggggcagtctgcttaagttattaaaaactggaaacaacaaaaataagatttatactgagcatgacccatataaaaattgcaaaccggcctgggcatggtgagtcacacttttgtaaacagggcctgagcgtggtgagttacacttgtaatcccagcactttgggaggctgaggcaggaggatctcttgagcccaggagttccagaccagcctgggcaacaaagtgagaccttgcctctagaaaaaaatttttaaaaattagctgggcatgacgatgcaagcctgtggtcctagctacttgggaggctgagacgggaggatcgcttgggctcaggaggtcaaggctgcagtgattatgccactgcactcccgcctggatgacagagttagaccctgtctcaaaaaaaccccacaaaattgtaaacaagatattacatattctttattgtaatacataaagatttaattactgaccaaaataatgaaaatgaaaaaaattatttttatcaagtccacaacttaagtcaaatgaaatccctgcaattttatataaataaagatttaatgaagatattactgtaagagatggccaaaatcgcaacataagtgacagacatatgctgaaaataaaataaaaaatacgttataactatgtttaaactttgtacaattattgtttcactcccaaatatacttacagtggctttttcttttttttttttgagacagggtctcactctgcccatgctggattgcagtggcacgatcacagctcactgcagcctcaaccccccaaggctcaagtgatcctcccacctcagcctaccgactagccgggactacaggcacatgccactatgcccagctaatttcgtttattttttgtagcgacaggtcttactatattgcccaaggtgatcttgaactcctggactcaggcaatcctccagcctcaccctcccaaagtgctgggattacaggcatgagccactgcacctggccatatattgtgacttttattaacaatttcatttactattcctcagctaagcggcttcaccaaatgtaaattaattaaaaagtctaagaactacactgacctaatttgacattaatgttaatagaatacaaatcgtgagaaaatcctaattttaacataagtagtattttttaatttttaagtgtttagttattagatggcattttggcctctgtttatactctctcacagaccatctagtagttagcaatggacttgagactggtcaacagttgctaaatcagaacccattaacttaaccaggtgtggactcattaacttaaccggaggatactgtagacctgataaccacccttaatacttcactgggatcatttggcaagcaataatgcaagcaaattaacctgaagtgattcagctagggtgaaagaaatcagagagaaaggatgcatgaaaggaagatggtttctaaatcactggttcacatcagaatcaccttcacgaaacattgaatagagtagacagggctaataaaatttttcacccagaaaaggtttggccaaatagtttccagactatttgcaaaactggagtggtaatgagttgctggtttacttttgttattatttttttcttaaaaaatagtgattctaatgtgtggaagcaattgcaataaaatactctagatatgacttagtggcatcatcttctcattgaaaaaataccccaacctcatcttatctgcaatggaaatagagtatttctttagtgcatataatgaaaaaaattacaactgtcagaaatgatagcctagactacttgaagaaagcttcccttaaagctgtaaatcaccagtgttagcacaattgagtaaatttccttttccttccttttttattcttctccctgtctatatttcccctcctctttatttctttaattgtccgccttataagtgtttccccacgttgacattttgagtaatgcttctcattaaaaatttaaaaatattttcacatttttgaacatatgaagcatcaaaaatatgtggcctttgtgatataattctttagatttgtgacagatttgggaagaagatatttttagttttgacatttgagaaagtttttacctgtattaaaacatatgttatagtcttcattaggattcctatttgagcacaaaaaaatatctgcaagaaaacgcaaatagcagcaacagtgaagagcactggcttaggtcaaacagacttcaatttaatctgagctccccctttgccagctgtgggacataaaacaactggcttaaccttcactcgtctaaatgtcgtcatctgccaaatgggtgtaatagtagctcctatctcctagagatgtgagaataaattaatctgtgtgaaatccttggaattgtgtgaggcacacagacaagcttgtggatgttattattgatcccactgttattattattattcattatttttaactgactctgatttacttttataaaataaaataatacatgcctgatatggtttggctgtgtgcccacccaaatatcatcttgaattatagctcccataaatcccatgtgttgtgggagggacccgcttggagataattgaatcatgagggcagtttcccccatactctttgtggtagtgagtaagtctcacgagatctgctgattttataagggttttccccttttgcttggctctcattctctcttgactgccatcatgtaagatgtgcctttgttcttccctcaacttccgtcatgattgtgagacctccccagccatgtggaactgtgagtccattaaacttctatttctttataaattacccagtcttggatatgtctttatcagcagtgtgaaaacagactaatacaatgctcacaatagaaaaatgtagattgtaaagaagcacaaaatagagtcttcttctgactgctaccacccacctctctgttaatggctcttatgtatcgtctctcaaattattttaggaaccagcttatatatgatcctttctgaagcttcatgcagagcaatcagaccttgccctctgtttgcacttttgtcacttaacatttatcttgaatggctttctctatccacacatctacatcactctcattctttataataactgtatcatattccattgtatacatgtactacaatttatataaacatccttttgcagtttttttttttttgcaattatgtctgttaggaaatgtcctaatgtagtataatttctggattaaactatgtgtattttctactttggtatattttgctgaattaccctcccaaaaagtttgcattaatttactacagtggtatttaatgcatttgggtatggctctgaaaacatgtatgtaaatgatctgtttgaaatagatttttaaattaaattcactagggatatgatttgctttagcagggttcatgaccctttgtgataagttttgaaagatgtagattctcatttttctgatgatgtgcattcaagaaagtgctgaggtgtacacatttttagaggaagcatgtctttgggagactgaacaatggccagccaataatgttcacaacccaatcctttgatttcagcccagtgaaactcacaccagacttctgacctccagagctaagattataaatgtgtgttgttttaagtcactaagtttatggtaatttgctacagcagcagtaggagacaaaccattcatgtatcccagatgaagattcagctatgtgggcacatgccctctgtaagaatgtatgagagcacagctttagaaaaccaaaagctggccaggtgcagtggctcatgcctgtaatcccggtactttgggaagctgaggcaggaggatcacttaaggccaggagttcgacaccagccaggccaatatggtgaaagcccatctctaccaaaaatacaaaaattagctgggcatggaggtgcatgcctgtaatcccagctactcaggcagctgtggcaggagaatcacttgaacctaggaggtgcagtaagccaaattggtgccactgcactccagcctgggtgaccgagctagactccatctcaaaaaacaaacaacaaccacaaaacccagaaaaccaaaaacctttagtacacaaagtagaaaaacattgaaccggtcacatttggagcaatacaacagacctggaggtcaggatactaagcaaaataagccagacatggaaagacaaatactgtatgatttcacttctatgcagaatctaaaatagtcaaactcatagaagcagagactgggtggttcccagaggctgaaggcaagaaggggtaaatggggaagtgttggtcaaagtgtacaaagtttcagctatgcaagatagataagttctggagctcttctgtacaagatagggtctataattgacaatattacatagtatacttaaaaatgttctagaaggatatatctcacattaaattctcttaccacaaaaggaacaacaaactaacaaaaagtaaaatgaacaggaggaaattttgtaggcagtaaataagtttgttgcattgcttattggtaatggtttcaggggtatatccttatctccaaacacatcaagttatatacattaaaaatctacaactttttgcctgtagtcccagttactgaggaagctgaggcagaaggatcacttgagcccaagagttcaaggctgcagtaagctatgatagcgccactgcactccagcctgggcaacaaagcaagactgtttccaaaagaaaaaagaaaaaaatttacaactttttgttatgtcaatcatatatcaataaagtggtttagaaagtgttgagcaggccactccagctccccatcctccactgccctagactccaagtgtctccatggagcacccagtgttccaagaagcagattgaaaactattccttcagtaaatgaaacaagctttcctttaaaatttgagcatgtattagtaaatctgatcttaaaaacaaacatttattttcacttggtaaatttgtttttgtttttgtctttgagacagtctcgttctgtcaccaaggctggagtgcagcagcaaaatcgtaactcactgcagcctggatctcctaggctcaggtgaccctcccaccttagcctcctgagtagctgcaactgtgggtgcatgccaccacactcgtctaattttttatatatgtatattttttagtagagatgaggtcttgctatgttgtccaggctggtttcaagctcccaggctcaagcaattctcttgcctcagcctcccaaaatactgggattacaggcatgagccaccatgcccagctttggtaagtatttttttttttttaacttggtaagtactattttttttttctattttcagggacgctatactgtgctaggctctgcaacacagcagtatacaagacacacttactctccctcccccaaccccacacctccccacccccgccccagcacaggttaaagtgcagtaaggaatgtagccaattccaatgtaacgtgacaaatgttttgattgatagggaaagagtagggaaagattaaagtgcaataaggaatgtagccaattccagtgtaacatgacaaatgttttgattgatagggaaagagtagggagctgtgcagatgaacagaacgggtactgtccatggtctcatgtgaggagcaggttaacagagatcttcctgaagatgtccaagctgagaacaagcagagtgacccagcctagaatgacccagtgcaggcatagaggaagggactgggtaaaagaaagagggtggaatgcagataattattcccactgaaagaacagcatttccaaaaacttaaaagtgagagtcgggtaaatttggagaaccagaagcagtttggcatggctgaagcacagaatgccacggtaaaatggaagaaagtgaggctgaagcttctgaggggccttgctgtttctataaaggtacttccggtttatcatcttgtccaggcagccctgtaggtctggggtggagcctcctttgcattttgaagaattactctggccagaatgaggaggacagatgagaaggaggagtactggaggtgggacgagcagtgagggggctactgcaggaatcaaagctcatcttggtggatctagacacaagggaatgactggaagagaggtttaggtcacacgcttggcagggcctggtgatgagtggatatatagggaatgtggcaggaagagagaaattcaaaaaagacacccggattcttgtcaggtaacctaggaaacttctatcctagaagctgagtttgagaacttggaggagggtattctctcagagaggtccagtaaatcgatgcataaatagatctgaaggcccagaaattaatttgggatggagctagagacttacaaattacaattcattcctgttatacttgttacaagcataacaagtgtaatgtaacaagttatgcctggtaagtgtagagcaaagcatggtggctcatgcctataatctcagtactttgggaggccaaggaaggaagatcacttgagcccaggggtttgagaccatcacgggcaacatagtgagaccccgtatctatcaaaaaaaaattagctgctgtggtggtgcacacctgcggtcccagctactgggaaagctgaggcaggaggcttagttgagcctaggaggttgaggttgcaatgagccatgatcatgccactgtactccagcctgggtgacagagccacaccctgtctcaaaacaacaacgacaaaagcaaagacagtgaattaaattacctagggagagggtgtagaatgggaagagagtttaggacagaattctggggaaaccaaagaataaaggactaaaggaagagaagccaccgtgaggccgaagaggagcagctgccagggaggaggaaaggcagtccagtgtgaggaagtggttagcagagccagatgcggtgccgtggagggttaaatatgatgatcacagaaaacgtctcttgaatgtagtacagaaggaggtcttgatcttcactcaaatagttccaatagtgtgatgggggcagaagggtgaccacgagatttgaaagtgactgggaactgagatctggtgataagggatgcaattcagagcacaggtggaagcactaacctcaaatgagggaagggaaatgctcaactgtaagagaaggaaaagaggaaaagatgggtgcatttatattttcattaagaaaagattttggcaagacttcaaatattagagaatgaccctctgatatccaaattataagaaagtgcaatttgcattcttttttatttttattttgttgagatggggtctcactctctcgtccagactggagtacagtggtgcgatctcagctcactgcaacctccacctcccaggctcaagcgatccttccacctcagcctcccaattagctgggatgacaggtgcatgccaccacgcctggctaattttttgcatttttggtaaaggggtttttgccatgttgcccaggctggagcaattcgaattcttgagttgtcttatatgacagagacaggaccgacaaagattaattttggctttacctaaggaggaatttgttaataattatagctactaaaattgaatgcttgtgttagtaaattgcgagttccctgtcactggtatgactgaaatagaggcagtagcttctttaagaaagagtaaagagtaaaatggggatggcagggttggaggttggaaaacagaggattaaccacatgctttctaatgtccctttctgtccttgacattcaaccctgcaaactacagcaagcatgttatgtattgagtctcatccctcttgattccttttggctggtggttaacatttcatcctgcagatccagccttcagatccagaagcagtcccaaatatttcagaactaaaaactgcatagtctccagggtggggactggaattaggcctctgacccttgcttagtttccagagtgtctgagttgagccttgggactccctggatgcccacaacactgcagctttcctccaaatcaccacaagtgcccattccaagtggcgttgtctcacttattgttgagcacctgctatgttccagatgctgtgctaaatgctaaatatatgatgatgaaagcacattccatgaggacacgatttttgtctaaaaacagttcactgatgtatccccagcacctaaaatggtgcctggtacaatgcaagtcttgataagtattttttcaatgaatgccacagactgtcttctcgaatccagtgtacaagacaagcatatacactgacgactgcagtataacatggcaagtactgttatggaagctcataggaagcacagaaggggaatacttccttagcctggggattttttttttttggtattttggttcccaactagcattggagcacaagcctgaatcaaaatctgcctgctgacttgccagcctttgccacacttgtctacccataaagcagaaccatgtcactctaccttaaaccagtagcttcagtcaaggcactcatcttaggtcccttgggacccctctgccattgaggcactgccaccatcatgaccacgagtggatattgctcctgaccagagaggtaggcactcatacctaccaggtcagatcacacctaccaggtcagagtccttagagagatgaatgccagtctcaattgcaacatattagacattgtatctttgacagctggctgagctcttagagggcaaggcacattgccaggagaatgcctctagcaccagccacactcctgcccctgtgctgcccgccttagagtcccagtatggttcacaggatgttcaaacaagttctctaggaattaacaatccagccactagcccagctcatttgctttctagcatgtgttactaggaacactgaagtgtcatcataaagagagggacgtggtggtaggagcatgagcttgagacccagacagcttctttgcctcctttgtatgactttgggcaagtcaccttaattctctggttccccatctctcccttcttttttattttttccctattttgacatatcaaatatgcaacatacagaaaagttgcaagaatagtaaaaagaattcccagaaacccttcatccagattcccaaaatggcaactgtttctgcaattgcttcatcctttcctcagtcactatctgtgggtgcttgtgtgcacatataccatgcatctcaatttttttctgaaccacttaagaataggttgcagacaccctctttcccctacatacttcaatatgtatttataaaaacaaggaattcctcaagtaaccagagtacagttttcaaaatagaaaattaacattgaaacagatactattatttaatctacagacctgttaaggtgttgtcaatgtttcagaaatgtcccttatagcaaaagaaaatcccagatcatgcatttcattcagttgtcatgttctttttttttttcccccccactcttctgctgaaagagaaagttgtcatgtttttaaagactcctttaatctggaacattttctgagtctttctttgaatttcatgatattggcatttttataaagtatagcacagtgattttgtagaatgcctgtaagtttgggtttgtctgatgtaccctcaagagtatattcagaggctgggcgcggtggctcacgcttgtaatcccagcactttgggagaacatggcgggtggatcatgaggtcaggagatagagaccatcctcactaacacggtgaaaccccatctctactaaaaatacaaaaaattagccaggcttggtggcagatgcctgtaatcctagctactgggaggctgaggcaggagaatcacttgaacctgggaggcagaagttgcagcaagtcaagatcgcatcattgctcaccagcccaggagacagtgggagacttcatccccacaaaaaagaatagatttagattattcacttttggcagaatgacacagaggtgttgctgagctcttctcagtgcattgtgtaagaggtatgtattagttcgttttcacactgctataaagaaatacctgagactgggtaatttctaaaggaaagaggtttaattgactgtggttccacatggctggggagacctcaggaaacttacaatcatggcagaaggtgaaggagaagcaagcaccttcttcacaaggcagcaggagagagaagagcgaaggaggaacttccaaacacttataaaaccatctggtctcataagaactcactcaaaatcatgagaacagcatggaggtaaccgcccccatgacctaatcacctcccacctggtcgctcccttgacacatgtggattttggggattacaattcgagatgagatttgggttggggcacagagccaaactatatcaaggtatatgctgctggttagtcccattgctagtaatgttaactttgactattttctaatgtggtgttctgcagttttctcaactgctatattttaccctttgtatttaaagaaagatcttgtggggatgcccattactccttaaacaagatgaatcagttattatactggctggcaaaggttgatttttataattccaacactctttctagatgtatgagttggcagtcccttgtaagaaagagtttaccttgtcccccaattggcttgttttactcgagactcatgaagtttaatttactaatagagtaaaatcctttaatttactatttttattttgatactcaaattgtccctggttttgccaatgggagccccttcgagctagctctttcatatttttggtatgtcctcatcatcctttggtatgatgaaatgtcccaggtttatcttattctttctgtaaactacccctgcttagccatttttattttcagagaaacctggctgtttttagtgaagaatggtatttagaaaacaagatctagtgctaagaggtgaaccccattgttagtgggatttcatttttttctaggtactctcagaggacagacctgagtgggaaggagaagggggagtcatggagttgggggagagagagacagaatatatacatacatacatatacatatatacatacatatatatgtatgtacatacatgtgtaggtctgtatatgtgtgtgtgtctttgtgcgcagtatatatacagataacatatacatatacatacatatattctgtacatacacgtgtatgtgtatatattctgtctatatacatacatatatgtatatattttgtacatacatgtgtatgaatatatattctatctactgtatacatatacacagatatgtttgtatgtgcatattctatctactttgtatatatgtgtatacagatatgcatatatgtatgtatatattctctctctactgtttgtatatattctgtctatatatactgtgcagttatatgcacagaggcacacacacacatatacagacctacacatatctatatccatttgtaccaatttgtctatgtccccatgagtcacactgatatctacaattctagtcccctcttcagattatcgctatcttctccaacagtgagaattctggatcccaatatcaacaatgtacgaatttatttatttgttcaattctagaatatacaagtagttccagaattactaacctatatttctggataaaaaagaggtctactaattggagttcaatatttgtttagaggtctttttgcctttagcctgaaggcaagtaatctaggtattgtgttcaacatttgcttgagttaattttttctcccttcttgagtgtgattattttattcatttgatttatgtagatcaattcatttgtttccaattgtatttagttttaggctatcctccccttctttgtgggtttttacatttttatttatttatttatttgaatgtgagaaacagtaatattatgggttaaattgtgtcccacctcccatcccctaattcattattgaattcctaagccgcagtacttcaggactcacccttatttggaaatagggtagctgcaggggtaatcaaataagttaagatgaagtcatcctggagtaggtgggtcaatatgactggtgggacaccagtattactggtgttcttataaaaagggagaatttggacccagagacatccatacagggagaacatcatgtgaactggtgttacgctgctatgggcccgggaaataccagaagctaagagagaggcctggaacacattcttcctagtgccttcggaggaagcatggccctgccagtgcctggatgcagacttctaggctccagaactatgaggccacaaatttctgctgtttatgccacttagtctgtggtactttgttatgacagccctaaaaacctaatacgattaatatagttccagaagtcaggtctataaaaagaaggtgtattcagagaaatgaccctttccgattgttttctttactttctacccaactctcaccatgcccagtagcaaccgatatctttatcttagtctctgattttttcttcttgagtttcttttcactcaagcttatagttcaatgtatatgtttttatttttttctggaaatcactctatattacttcccacagatcttattcattcttttgtatggctccatagtagtccattttgtagatatggcattttgtgtgtacattgtggggaaatccattttgtgtgtagacgtgtccactttgaagaatagtttcttcaactattctcctatgtgtgggcatttaggcattttcaatgcaaacaatgctgcaatgaataaccttgtgcatttatatttttgtattggcgagggtatgtctttagagtagatttctagaagtgggattctttgatcaaaaggtaaatacatgtgtagttttttaggtattgtgaaattctcctcaagaaggctgcattccctttagcaacatatgagagttcctgtttttccatagcctaacaaatagagtgtgttatgtatttttaaatgtttcctaatctaataataaatgacatatcagtgtagttttaatttgcatttttcttatcatgagtgaagttaaaccttttttcatccatttttatacccttttgcgaattgtttctacatttccttacatttttcatttggatttttaaaatcttttcactctcaattttgaagaatgttctatatattacagaagttcaccctttttctgtgtgatagaagtgttttcatccagtaagtcagtggcttttttgactttgtttatgatgcttttcgctgtctagattttctttttcatttttacatagttaaaatcatccttttttttttttaaattacgtccagatttggagaatccattaggccttttccagcttaaagagtaatttatccagatttccttattgtacttgatggtttcttttctttttttttttttttttttttaacaataggttctttatctgtttggggtttattcttttctgtcaggtgagttatatatctgatgttatctttttttcaaatggctaccagttgccccagaaccatttattaaaattcattctttgcctttttgatgtaagatgctccctttatcatatactaaagtttcaaatatgcttggatttctttctggacttttgttctattcaacctatctgtcaacatctactagtaatatgcttttttcattatagaggctttataatatgttttctttcttgtttttttttttagaatagaatgaggcaagtatgttttaatatctagtagagctagtattccctcaaagcttttttaaaagtgtttttctggatattcttgcatgtttatttttccatatgaagtttgcaaaattttttagtgatattgcattaaatttataaatttgcttaaaggaatgacatcctcatttttgtgatgttgagtcttccaatccaaaaataaggatgtttttctgtttgttcaagtctatttttatatctttcaagagtgtttaaagttttgcactatagattttgtacactaattgttaaatttatttctaagtactttatcttctttgttgctaatgttaatggggctttgtctgctctgtgttctccaactgattatcctttatgtaaatgattgcagcctgcccacacctccgaggctggccctgtggaccagttggccttatttcttcagtggaaatctagtcactatgatgtggtagttggcgtgttgtcaccttgctataaccataaacttcaaaatgtgataagcagctggctgatcattggatacaacatcctgcattaagtcaacgtgtgcttgtcaaattcataatagatgcccatggctgctaagggcctgtggaagaccaggaggatccctactactcaacatcacaaatccagctttgaatcaggaaattgaggcattcagtctttctgaagacacttcatcagggttcgctgaggaccgagttgtcagtgtgagtttccaacttctctacacgatccttattaccagtcttggggtgttctacaatgccaatgatgtgggtttccagaggaacgtcgctctcaagctttctcaggcagaacgggaagaggcccccttcattgttcactagagtcctccaagccatggtgtgcaggtgaacaagttgtgtacaagcacatggaacaattcatcttaccagagagctttgaaggtacaattgtatgggagagtgaagacctccacaactttgtgttaagaaatcttcacaaagtgacactgaatatggaggggggattcttggagtcattacagctggggagggtgcattgcctcatgaattattggaaggtatggagggagttggagtggttttagatgccttattgaaggaggaaaacatcatctatgatgatattgtttttgtggatgttgtcaacactcattgaaatatacctgcaaaattattgaactttatagatggactatggaaacaaccaactttgatttgttgctaaagacagatgatgactgttacataggcttgaaagctgtatttaatagaatttctcaaaagaatctgaataggtctaattttgttggggatatttcagactgaattgggtagttgacagaaccaggaagtggcaggagttggagcaccctggtcatgcttaccctgcctttgcatgtgggtcggggtatgtgatctccagggacatcatcaactggctggcaggcaactccaggaggttatagacctgtatgtctatgtatgcgtaagcacttggatggcagccacaggacctaacagttaccagcacagcatgtgactgtgtgagaagacttgtcagacaggaatattgtcttccccacagtattctccgcaggagctgacagaactgtggaaactgaaggaattctgtggtgatccttgtcaatctgaagcaagataacaggatttgaattagcagtgtctaaactcggggtagctgatatggtttggctgtatccccacccaaatctcatcttgaattgtaactcccacatttcccacatatcatgggaggaacctggtgggaggtaatcagatcataggggcaggtctttcccgtgctgttctcgtaatagtgaataagtctcacaagatctgatggttttaaaaatgggagcttccctgcataagctctctctctctctttctctgctgtcatccatgtaagacacggcttgctcctccttgccgtccaccatgattgtgaggcttgtccagccacatggaactgtaagtccatcaaacctctttcttttgttaaatgctctgtcttgggtatgtttttatcaggagtcagttggtaccagtagaatggggtgctgttgaaaagatacctgagactgtggaagcaactttgtaactgggtaacaggcagagattggaacagtttggagtgcttagaagaagacaggaaaatgtaggaaagtttggaactccctagagacttgttgaatggctttgacaaaaatgctgataataatgtggacaatgaaatccaggctgaggtggtcttggatggagatgaggaacttgttggaaggtggagcaaaggtgactcttgttatgttttcgaaaagaaactggtggcattttgtccctgccctacagatttgtggaaacttgacagagatgatttagggtatgtggtggaaaaaatttctaagcagcaaagcattcaagatgtgacttggatgctcttaaaggcattccattttataagggaagcagagcataaaagttcaaaaaattggcagcctgacaatgtgatagaaaagcaaatcccattttctgaggagaaattcaagctggctgcagaaatttgtacaagtaatgaagagctgaatgttaatcctcaagacaatggggaaaatgcctccagggcatgtcagaggtcttcatggcagcccctcccatcactggccaggaggcccaggaggtaaaaattgttttgtggccaagcccagggtccccatgctgtgtgcagtctaggaacttggtggcctgtgtcccagctgctccagccatgactaaaagggacaaagacatggttcaggctgtggcttcagagggtgctagccccaagccttggcagcttccatgtggtgtggagcctgcaggtatacagaagtcaagaattgaggtttgggcagctctgcctagatttcagaggatgtatggaaatgccaggatgcccaggcagaagtttgctgcaggggtggggccctaatgtagaacctctgctagggcagtgcagaagggaaatgtggggtcagagccccgacatagagtccctactggggcactgtctagtggagctgtgagaagagggtcaccatcctccagatcccagaatggtagatccacagacagcttgcatcatgcacctggaaaagttgcggacactcaatgccaacccatgaaagcagccaggagaagggctataccctgcaaagccacaggggtggagctgcctagggccatagaaacccacctcttgcatagcatgacctggatgtgagacacggagccaaaggagatcattttggagctttaagatttgtctgccccattggatttcagacttgcatggggcctgtagccctttgttttggccaatttctcccatttggaatggctgtatttaccccatgcctatacccccattgtatctaggaagtaactaactcatttttgattttacaggcccataggtggaaaggatttgccttgtctcagataagacattggactgtggacttttgagttaatgctgaaatcagttaagactttggaggactgttggaaaggcatgattggttttgcaatgtaaaaaggacatgagattttggaggggccaggggcagagtgatagtggatatggtttggctgtgtcctcacccaaatcttatcttgaattgtaattccctcaattcccacatgttgtaggaggaacctggtgggaggtagctgaatcacgggagcaggtctttcccatgctgttctcatgatagtgaatgagtctcacaagatctgatggttttaaaaacaggagtttccctgcacaagctctctctttctttgcttgctgccatccatgtcagatgtggcttgctcccccttgccttctgccatgattgtgaggcttacccagccatgtggaactgtaagtccattaaacttctttcttttgtaaattgcccagtctcggatatatctttatcagcaatgtgaaaacggactaatacaataggcaaatgatcatccaagtgtaactctgaggaaccccaaggtttagcaataggtttatggtcttttgagagagttctagactggcactttcacctggaatcaatgtgtttcttaatgtttgcacaaatttccttttcaaaaatcaactgatattgtagcataagaaaagtttttatgtatctattggaagatgatttgaaaaacactaaattgttttataaaagaaaaaatatttctaaaaataaaaaaattgctgttgatttctgtatgtcaatttaatagcctgcaatattataaagtttttgattgaggttgccattgatttcctaagattctccaggtatatggtacatctgcaaatagaaaaattttatttcttcttttcaattctcctggctctaattgatttcttttgtctgactgcgttggctgacattgccagtagaatgttgagaatagtgaaagtagtggccatccttgcattgtgcctcttattcagtgttttctcattaagtaaggcactggctttaagactaaggaatatgtatatcttatcatgttaaaaatgtatgcaacaattcttattttcttgagtttttttttaaatcagaagagggtattgatttttttcaaaggcttttttcagcatttatggagataatcatactatttttcttctttaaaatttcaacatggcatattatactaatgaattttctatttttgaagcaagcttgcattcctgaggtaaattctacttggtcatgctgtattttttaaaatgtgaagttggattctttttgctaatatttagaatttttccaacaataagtgatactgggctgcaattttctctttttgtactgtctataccagggtgaagtgttaattttatagttgcttcatgaaaaatgaggatgttttccttcattttcaattgtctgtaacatgtaacaagagagcgttgggactatctgatctctgaagatttggtagtgattttcagtctctctagcacaaaatgggaacaattataatatttccttctagggagttgtcagaacaattcagttgatggacttggaagtgctttacaaacagcacatctcttgtcatgtgttgattactgtaacagaggcaagaacaaaatgtagtgcagaatgggtaattaaatcactctcaatttggaaaaagatagatactgagaaggtttcatagcaattatcttttagttcagttttgaatgaggagcaggattttactgacccaagaagtaaatattccagattaaagaaaaagcttcagtggagatatttaagcttatgattgcaaaatttaccatatccatgtagtgatgtccagttgacactttgacataaatttatttctttgattcttcgaggatagtaggtgatatggtttggcgttatccccatccaaatctcatcttgaattgtaactcccagaattcccacctgtcaagggaggaacctggtgggaggtgactgaattatgagtatgggtctttcatgagctgttcttgtgatagtgaatgagtctcacaagatctgatggtgttaaaaatgacagtttccctgcacaatctctctctttgcctgctgccattcatgtaagatgtgacttgctcctcattgcattccaccatagttgtgaggcctccccagccatgtggaactgtaagtccattaaacctctttctattacagattgtgcagtatcaggtatgtctttatcagtagtatgaaaacagactaatacagtaggatagatattatccccatcttaaggtcagagagggcaatgacttcacaagtaagtaacagatcctagcacagacacagagagtaggtgcttgataaatatttggagcattttctactgatacaaaaccacaattgattttgtttcatttacccttccttctgttcctgtcttatttttgtgtattatgcaattaaacatttattaccaatggttagtgttgttttgcatgatcacatactggccattcattacttcatttatgtatcttttatcttcacaactaaactataggtaaaattgtgatacactttgatagataaagtagacatttgttgctcgaactcctcgttgacagagacctaatttttattcttgcattctgcttcttcaaagagctcatgggtttcaagggaagctgacactgtcttccacccttccactctctagtcacaggtgagctcagattgtctcaacactaaccaacacattccactgctctggtatggtgatgggcagaggatccagtgtgagccagtaacaacagaactttttgggaaagacacatccttgcccttttttcattggctctaacaagaaacatgaggaaccagacagaaaatacatgaggtgaaacctgccccaaatggagctcctacaggggagcagatagaaaaatagacataaaccaaatctttttaaaaatttttattatactttaagttcagggtacatgtgcacaacatgcaggtttgttacataggtatacataggccatgttggcttgctgcacccatcaactcatcgtttacattaggtatttctcctaatgctatccctcccccaggcccccactcccagacatgccctggtgtgtgtgtgatgttccccaccctgtgtccatgtgttctcattgttcaattcccacctgtgagtgagaacatgcagtgtttggttttctgtccttgtaatagtatgctgagaatgatggttcccagtgtcatccatgtccctgcaaaggacaggaactcatccttttttatggctgcatagtattccatggtgtatatgtgccacattttcttaatccagtctatcattgatggacatttggattggttccaagtctttgctattgtgaatagtgccacaataaacatacgtgtgtgtgtgtctttatagtagcatgatttataatcttttgggtatatacccagtaatgggattgctgggttaaatggtatttttagctctagatccttgaggaatttccacattatcttctacaatggttgaactagtttacactcccaccaacagtgtaaaagtgttcctatttttccacatcctctccagcatctgttgtttcctgactttttaatgattgccattctaactagcgtgagatggtatctcattgtggttttggtttgcatttctttaatgaccagtgatgatgagcattttttcatgtgtctgttggctgcataaatgtcttcttttgagaaatgtctgttcatatcctttgccaactttttgatggagtttttcttttttcttgtaaatttgtttaagttctttgtagattctggatattagccttgtaagatggatagattgcaaaaattctctcccattctgtaggttgcctgttcactctgatggtgctgtgcagaagctctttagtttaattagatcccttttgtctattttggcttttgttaccattgcttttggggttttagtcatgaagtctttgcccatgcctatgtcctgaatggtattgcctaggttttcttctagggtttttatggtgttaggtcttacatttaagtctttaatccatcttgagttaatttttgtataaggtgtaaggaagcgatccagttttagctttctgcatatggctagccagttttcctagcactatttattaaatagggaatcctttccccatttcttgtttttgtcaggtttgtcaaagatcacatggttgtagatgtgtggtgttgttcctgaagcctctgttctgttccattggtctatatctctgttttggtaccagtaccatgctgttttggttactgtagccttgtagtatagtttgaagtcaggtagcatgatgcctccagctttgttctttttgcttaggattgtcttggctatgtgggctcttttttggttccatatgaactttagagtagttttttccaattctgtgaagaaagtcattggtagcttgatggggatggcattgaatctataaattactttgggcagtatggccattttcatgatattgattcttcctatccatgagcatggaatgttcttccatttgtttgtgtcttcttttatttcattgagcggtggtctgtagttctccttgaagaggtccttcacattccttgtaagttggattcctaggtattttattctctttgaagcaattgtgaatgggagttcactcatgatttggctctctgtttctctgttattggtgtataggaatgcttgtgatttttccatgttgattttatatgctgagactttgctgaaattgcttatcaggtaggctgagacgatagggttttctaaatatacaatcatgtcatctgcaaacaggtacaatttgacttcctcttttcctaactaaatactctttatttctttctcctgactgattgccctggccagaacttccaacactatgttgaataggagtggtgagagagagcatccttgtcttgtgccggttttcaaaggtactgctttcagtttttgcccattcagtaagatattggctgtgggtttgtcataaatagctcttattattttgagacatgctccatcaatacctagtttattgagagtttttagcatgaagggctgttgaattttgttgaaggccttttctgcatctattgagataatcatgtggtttttttcgttggttctgtttatgtgttggattatgtttattgatttgagtacgttgaaccaggcttgcatcccagggatgaagccaacttgattgtggtggataagctttttgacgtgctgctgtattcggtttatcagtattttattgaggattttcgcattgatgttcatcagtgatattggtctaaaattctctttttttgttgtgtctctgccaagctttggtatcaggatgatgctggcttcatagaatgagttaggaagagttccctctttttctattgattggaatagtttcagagggaatggtaccagctcctctttgtacctctggtagaattcgactgtgaatccatctggtcctggacttttttttgggtggtaggctattaattattgcctcaatttcagaacctgttattggtctattcagagattcaacttcttcctggtttagtcttgggaggctgtatgtgtccaggaatttatccatttcttcgagattttctagtttatttgcctagaggtgttcatagtattctctgatggtagtttgtatttctgtgggatcggtggtgatattccctttatcattttttattgcatgtatttgattcttctctcttttcttctttattagtcttgctagcggtctgtctattttgttgatcttctcaaaaaaccagctcctggattcactgatttttttaaagggtttttcgtgtctctatctccgtcagttctgctctgatcttagttatttcttgcctcctgctagcttttgaatgtatttgctcttgcttctctagttcttttaattgtgatgttagggtgtcaattttagatctttcctgctttctcttgtgggcatttggtgctataaatttccctctacacactgctttaaatgtgtcgcagagattctgatacattgtgtctttgttctcattagtttcaaagaacatctttatttctgccttcatttcgttatgtacccagtagtcattcaggagcaggttgttcagtttccatgtagttgtgaggttttgagtgagtttcttaatcctgagttctaatttgattgcactgtggtctgagagacagtttgttgtgatttctattcttttacatttgctgaggagtgttttactaccaattatgtggtcaattttagaataagtataatgtgatgctgagaagaatgtatattctgttgatttggggtgtagaattctgtagatgtctattaggtctgcctggtgcagagctgagttcaaatcctggatatccttgttaaccttctgtctcattgatctaatattgacagtggggtgttaaattctcctgttattattgtgtgggagagtaagtctctttgtacgtctctaagaacttgctttatgaatctgggttctcctgtattgggcacatatatatttaggatagttagctcttcttgttgaattgatccctttaccattcattacgtaatgtccttctttgtctcttttgatctttgttggtttaaagtctgttttatcagagactaggattgcaacccctgctttttttttgctttctatttgcttggtagatcttcctccatccctttattttgagcctatgtgcgtctctacacatgagattggtctcctgaatacagcacactgatgggtcttgcctttctccaatttgccactctgtgtcttttaattggggtatttagcccatttacatttaaggttaatattattatgtgtgaatttgatcatgtcagtatgatactagctggttattttgcccgttaattgatgcagtttcttcatagcatcaatggtctttacaatttggcatgtttttgcaggggctggtaccagtttttcctttccatgtttggtgcctccttcagcagctcttgtaaggcaggcctcatggtgacaaaatctctcagcattttcttgtcggtaaaagatattatttctctttcacttatgaagcttagtttgggctggatatgaaattgtgggttgaaaattcttttctgtaagaatgttgaatactggcccccactctcttctggcttgtagggtttctgccaagagatccactgttaacctgatggattaacctgacctttctctctggctgcccttaacattttttccttcatttcaaccttggtgaatctgacaattatgtgtcttggggttgctcttctcaaggagtatctttgtggtgttctctgtatttcctgaatttgcacgttggcctgccttgctaggttggggaagttctcctggataatatcctgaagattgttttctaacttggttccattctccccatcactttcaggtacacccatcaaacgtagatttggtcttttcacatcgttgcatatttcttggaggctttgttcatttctttttactcttttttctctaatcttgtcttctcactttagacataaaccaaatcttcagccaccattttaagctgcacctaaagccagcagacttacttttcaagcacagaagccaataaatagctttattctcaaaatcagtttctgccattttcaaccaaaggctttaaaactaacacaataaaatagacatgctgtatatatctgatatatctcattaatagtaaggaagcaggcaaataatcatgtactgagtttttgtgagaatataaatgtagtacagtgtagccattcatttcttcattcaatacacacttactaagcatctacaatgccactgggtgacagtttttcatgcagaaaaatatatgtgaactaccattaatatttttattaatgtaaaataaatgtgccattagtgttttaagatttttagagctttctatgaatgataatttattcattcattctctcaattcaacaaaaatattttcagcacttaccatgtgctagtctgatatttctcagagatgcttccccttgtgattaacagaactcatttgtagaaaagcatgttaatgactatgataatgaacgcacattaccagtccaaattacaaaaccagaactttgtaccacttgcccaatcttgtttactatattaatagaaccatgaaaagaaaaataaacattaagtttttatatatttatcaaattagatttagttttgattttgttaagtggtaagaaaaatagcagattcttttaacatcattatattcctttgatatacaaatatatcctgtaaaagttgaagtatatttaagcctgacttcataagatcaagtatattgctcaacagagcatttgtcctcacagcacaaaagaactatgcaatactgactgagcttcagaaaatgaatctcacccatgtttactttatatagtttgatatataatccatcttatttgtaccacaacattttgaagctacatttagaactgaaatttctaaagatgagattcttcggtgagtttataactttagttaactcttcaaattataatagatacctacaaattgtcattttgttacactagtttgatcagtcattaagttcacaagcagcattagaaatgttctttaaaataggctgcctcaatccaggactttgggaggctgaggcaggatgatcacttgagcccaggagtttgagaccagcctaggcaatgtaatgagactctgtctttataaaagatgttaaaaaattagccaggaaatgtggaatgcctgtagtcccagctactagggaagctaaggtgggaaaatcgcttgagcccaggagattgaggctgcagtgagccataatcgcaccactgcactacagcctgagtgacagcaagaccctgtcaaaaaataaaatatagtaaaataaagtgaaaaacaggctgcctgattcttcgatttgtacattccactgccataaatggatatttctatttgaaaatcctactgtcagctcaaaagcagcatgcccagtgcttaatctttctctgttccattcccagccattctcaccttgcaccccaggccattcgtatcatgaatttgatgcacatcactgtatcagtcgtgccatacatctatgtacccatatataatatatagtaatatttatgtacatgttaaaatatccatacagagataaacatgtgttttgatttttttcaccaacatatttttgagatatatcatgttcacttacaactccttattaatttcttttaagggctatatagtacttcacctattgattcgtttttaaaatctacctcatatcaatggacatttatgttgctctaatgtatctctattagaaacaatgctgtaatgtacatttttgtactagtgtccttgtgcatgtgtttctctggggtattgacctataagttgacttgctggttatgggataccacagaggcgcagttactagatactgctttccaaagacaggctaatttagcagtgtttgaacattctcttttcttcacgttcttgacatttagtagtttcatctgcattttcaacttgaaattccttaatctcaagctacctttgacaagtccccaaaatatctgcaagataatttgatgtgcccctagatgcctcagcagtgtttggctaatttctactaaaactctttgctacaagacaccttcatgacacacagtcaattttaatgaactaaagattctaattccatattcaactgctaaacttcctctcagaatcccatcaccaaattttggcaaatactttcagtccaatatcataaatctagtcactacagaactttagttaggcttgtacaaccttttgtgtaagcccccaaaggtcattctccatggagtacaattaacagaacaatgaagaggaatacgtattggccaggatgtgggaacacaatcacttttacgtatttctgatgggagtacaaattgattgctatataagctttggtgtaccgttgaccacatctagtaaaacaaaaaatacacgttgattgtattgagtttttatttcagccaaattcatttggtaaaaagcagtattttataattatggaaaattaacttttcttcacaggcatattggcattttgtatttcttttttaatataatttctagtttgtatcctttgttaacttttctgttaggctgtttgtatttccttattcatgtgtaacagtactttctatattcaggatgctattatttcatataattttttgtgtatttatataaattgcaagtagcttcacactgtattgcttgtctttgaactttggttatgatgtctttgttctttttggtctgaaactttcttcttcttataaaatattgcttaatcttttaaaaagtttatgttcctaatccactcgtaattttattgtattttattttatttttgagatggagtcttcctctgtcgccaggctggagtgcagtggcccaatcttggctcactgcaacctctacctcccgggttcaagcgattcccctgcctcagcctcctgagtagttgggactacaggtgcaggccaccacacccggctaattttttgtatttttggtagagacggggtttcatcatgttggccagatggtcttgatctcctgacctcgtgatccgcctgcttcagcctcccaaagtgctggattactggtgtgagccacctcgcccggccacttgtaagtttttaatgatgtaaagaaccctaatttatattttccatatggaaagtcacttatcgaataatatatattttctctaccaatttttaatattaccactgtctttacactaagttccagaacctgcttgggtttgtgcatactttattctgttccattgatctatttatcttttccaaaaccaagatcacaatattttaattactgtagcttaatactaaatcttgacatcacgtgaggcaaatccttcccctgaactcctttgaaaattacctggactattcttggacttctacttaaatatcaattttagaattagtttggtagatttttttcattgaaaaaatattgatttaagaaattaattcacagagaattgacttcacaacattacatctcctagtctatggacatctgcaattattcagtgactttttaacatatttcaacatagtttaacaagttttccacatataattgcttagttttatcatgataatttaagattttgttgctaatttaagtaagatctttatttgtttgggatattttctaattatttattaaaaagggacactattaaattttgtgtgcttatcttatttcccaaaacttttctatattatttcattgattttaattagatagttatttatttttattttatatgtcatgtcatcatatactctttcaataatagcctattaaccctttatttgttattttatctcttattcaattggttaagattttcaacagaatattgaatcatgggcaagagatgttagctttacttattttgttattgacactattatttacaaatcagtgagtgaccattaaatgtatagtttacattaggattttataccagataaatagattttattttgtgtttagaatgaatttttttaaaaaaaacatgaatcttgaggtgtctgttattttcttctttttataatgagcagttttcttctttaatctgttatatgttgacttgtattgagagactgtcaaatgctaaactatttttatatccttaagataaagtttatgataatgagttaacatttttaaaagtacacagtttggattcatttggaaatatttcattttttatattttttaaatatatcattataagttatgttggtctattattttattctcacttacatttgtcaaattttggtatcaatgttaggccaaacttgaaaactaattagacaactttttctctttttctattatgatagagattacctggtccttaatcatttcatacaatttacaatctgaaccagatgtgctttagggaaaagattttttatttttactaccaaattaagttcccctaataattattaattacttagactttctaatattctattattaaaaaaaattgtctattttatcaaaatctcaatttttaattatatgactctaaaatcctctacttcatctgaattatatctactattttattccaaacattgtttgtttacattttttctttttcttggtcagcagtggcactttccacacaaggtaggggtttgacaggtctggaaatatgaatttattttaatgccactttgctttcatattaagagattttggtttattcactataaatttacactaagtctattagcttcctttaaggaaataattataaacaccagactttctgttttattaaccaaattcagtgtcagcaaggccaaattctcacctgatcatggggaggttgggacgcagagggtcaggagaaagcagagtcagtccccagatatttttggacaatatatttgcctcaagttgactagcattctgaatagtgccttttcctccattggataactttttatatctggttgtttttaaagatttttatctttatcagcattcttcctcaatttctgtatgtcttgatcaggtttaggttctttcattaatctgacttgacatttggtacaccctttaacctggaaacacatatgcctctgtagtttcagaaacccttcagctattacatccacatattttctcttctttatttttactggcaccctgattaaatgggtgttgaagcttctcaatctagcttccatgtttcaacttatctatattttccatctctttttctgtagtgaattctgagtttctcaattcttttttcatgtcattaatctttttcttcagccatatttagacaactaattatcttgtccacttagctttttatagcaatgactatatttttcatttccatgatttctaaatctgttgcttttgtatgattaccaactgttctcactgaagaaatggtgtttcctatttttctgtttgagggaaaatatggactatgtatatatttgttttaaaattgctgccttctttttctctctgtggttgaaattcttccatatcttgaatatgctctcttccatagaggtatgtttgctcaattgatttgtcatttttggaagaactatgttgtgtaaaaaaaatgttgtgcatgttgtgctctgatttgtggctttgtgttttccttggaccgtatctctgtgttacataggtcagaccaagtctttcattagagctttttgagatggctcttcttcgttgagagggatgggggtggtatcgcatcagagagaggcaaggggacaccccttagggactcctttcccaggaggccacatctgagatctcactacttcctgtatactcttatttccttccaaactatgtggctccttgaaaattgaaagccctttattcacgttaggtccttggggaattgccaggtaacactcagggctgggacctggggtgatgggaatgggaggagttagatcagcccctccacaggactgaggcagggaggcaggtcaaggccattcagagactctctgctcacagcagcacctaggaggtccccacattctagataaagtgatgctgttgagatgagaggcaattggatttatatgaaatcttcctgtgacctttgcctgtgacatttgcctgagacctttggtctgaggggagtttgcttaaagctctgctcctggagataatgttctcttttgtgagtgatagcttccaggtggctgagatctgctgctagctttagcacaaagcttcctggcctttggcaagaccaaaagcgggcattacactaccttccaaggaataatctttcctgaacacttggcacacaaggatggaggaaaatgaggtgagagaagaagccaaaggattagaacaattccgtagtgaaaggatgctaacagtaggggcagaaacctcaccatagttctttgtgccaatctataaacaaatacttgtgtctcaattactcagttgtacaatggcatgctatacttattcagtgcttaccatactgtaccatactatggttatcaaaaaaacttctaagtttttcagagggcaccaagtagtaatttttctgcctaaggccaatctctcattttatctgcatcctagtcattttgtgacagcagcttcctagaaagagatgctgatgattcataaccaggtactactgatatgctcattagaagacttgctaactactttaaatttgatagaaaattaaccgcaagtctaactcaataactcctatataaatcttaatttactacattttttcagtgttgaataaaagaatgaaaacctgtaatcttcagagaataaaagcacagcaaattaagaaaagactgtaaaacattttggggggaaggacaaggggtaactattataggatgaaatatatttgacattatcttctggaaatgaccacttaaaacctaattcattctcagggttactgaaaatcataagttattttcatgttctcaaactattcaagatatagaatggtgctcgatggtgaaagccattgtgaccataaaaatagtcatataacatagtaggcatcactacagccaattgccacttatcctttttccttgatgccattaacccaactggttgctgatggtttggaacacactgccatttaatactccacttagactgtacacatagtgttagttccaggagacaactgggaggcctataaaggaaagggaaagaggagctggattgtaagattaaatatttctgagattgtttctggtttgtttttaaagcatggccagcacagtttcacatttaagacccactgatactaaacacttacgaaagaggggaaaaaaacaactttcagtcctagctgcaaggtagaagttaatttttaaaaaattgttattattattatttttcgagacagggtcttgctctgtcacccaggctggagtgcagtggcttgattttggctcactgcaacctccacctccctggttcaagcaattctgctgcctcagcctcctgagtagctgggattgcaggtgtgcgccacgatgcctggctaatttttgtatttttaatagagatggggtttcaccacgttggccaggatgatctcaaactcctgacctcaaatgatctgccgacttcagcctcccaaagtgttgggattacaggcgtgagccaccatgcccagccacattttttttttaatatgaaaggaaagacaccaacacattgtacattactgcacaatgtacacatagcctttatgcacgatgtctctgagatttgtgtactttttcttttggaatgtcctgagttctggaaagctggaatggtgttcattcctagtcccacttgggtttttgcccatttgattgtcctctggtgaatgttatccatggcagacaatgactttttacaagccactttgagattgctcaagtgcttgtgtgtccatgctaccccatgctatggaatggactctgcccccacaccaagacagtgtccagttggggcatctccatctggattcttttctgtcactgtgtaactgatggattttttccctctcattttccaccgcaatcacaaacagtaagtaggtgcccagagaagagggagattagatctagcgttgaccacggaaggaagcacgttgattaccgccgatgcttcttctctggggtggatctttctgcccttaaaaactcagcctcgagctcagcctgattgggaattctaatatctgcagatgctactatcttttccttgtaaaatgacaaggagatcctctagatctgcattggcaaatgcagtagccactggtttaaatttaaattaaattaaattaaaaattcagttcctcagtcaagtagccacatttcaagagctcaatagccacatgtagctagtggatactgtgtaacacagcacagatatagaacatttttatcattgcagaaagtgctattggatagaactgttctgcaacatacatagaatatttccatttcagcagcaaaatttggcgctgagaagatacttgatatcttttgataaggtgactatcttagaaggtcctttgggatatgacaaagtgataccctgaaggaacaagattggagaacaaaggatagttgttcttccgtcagctaaggattttgctttgattacctgtgtaagttagctgtggtctgaatctgattggcttggaacatacaggtgttttttagaggctgtgtagagagaaggcaaggaagggaaaagagatctggcaattagcggctaggggagagagccaggatgtctaatgaagggataaagcagtatgctttgtcaagtgcaatgcaatccctcctctatctcccccgaaaaaccttgtgtaaaatattctttactcactaattagttgaaaatttaaaatgttgtttttgctgagtctgctctcaaaaggagtattgggaatgtacaatgtgtccaattacattgggtttaaacattttactcccttgctacttagtatcttctttctccaaggcaatctgtgcatgtcttttccttaggacattaaagacttttgattggcagaatcagctcaatgatcagtcccttcccaggtgtgccagtgtttgacatttccctggagtcttccagtttgcaactaatttgatggattatagctgactgctttgaagcaaggaaaaatgaatttgttttttctccttatttaacaaatatgtattgcacacttgatatgtaacagacagtgttttagaagttggttatatagcagtgaacaaaatcatattcctgccctcaaatagcttaaatctcttctccttttgtgccctatcatctacccaaaaacagctagttacagatacgacaattactagatacactgctttacctgttacacttgagcatgctaaacattatttaatttaaagattaccattcatttgtaaggtaaggtaaaaagattcatctggatcacacagttattaagagataggggtagggttccaacacaaactttcccctttctctcttcccttttccgcctcttgagacattatatgcgtaggtgaaccaaagatgggaggtgggagaaaaatcagatgtgtcctttgcttttatatttcccatagtgcctagcatgatatcccagaacctagcaaaattgtctgacatgtaggaggcattcaataaatatttgttggctggttaaataaatagctacataaatggatgggaaaatggcatcgtgtgcagtgtaggcatttaatccatatttgttgttaaaggctactccagaagtaggataaaattaaattctcctgaattagatttggcttactaaccaccttcatttaggtttcaattatgcaaatcagttttttgcaacaacttaggagttggtatttttttcataaaatataattattagatgcatattaatagtgtaaaataataattcttaatgttggaaggatataataaagtgggtatgctcaaacttctgaggggagaataaataagtacaacctttctgaaaaccaatttgaaaatatttttcaataattaaaaaattgtcacaccatatgacctaataattctacttctagtgatccatttaaaagaaatatccaagaatgcaaatgaagacctatctaaggtctatctacttaatgtgaggaaaaaaagccaaaaaattcaagcatcaatattaaggactaaataaattataatatttatagtatagaaaaatgtacagccattcgaattatctttaataacctgtttagaatataatgttaagttttagagaagcagaatttaaaactatagtataatccaaagtattcaaataatgcacacatacatacacatatacacacacacacaaatgttggctgagattatctcgactctgaattgtaagattatgagttatcttggttttcttctttttgcattttttttgtttttaaacaataaagaacataatactgtggtaatctctaagggtgttaatgtacaaaaatatacaggcataataaagaaatacaaactcagttttagacaatgaaatgttatatcaacttttaaaatattgtttagattaacagtttgatattttaaaaaggtgtcatttaaaatacttagttgaaataatatttttggtttgtttaattattgggtatgtgggaatggtggtggtgaatatttttcactaagaagaaagtcaagtggtaattaactgttttttaggatgtatttgagcctcatttactgaactaccaaaaacatttacagaataaaataaaatgtaaaagaaacagctaagtaagaaataataaatggaaaagttgtaattttattgtcctctattacaaatgtgaaatattcccacattttttcatattttatgagaactgtttatacagttgaaagtttctatagaagaattacattatcttcatatgaaccatattgtattttcttccttttttgacaatttttaccaaagctatatctatggatgctttgttatgcatttacttacctagcaattcatgtttctaaagtgtataaagcaacaacattgagaagtgcttttgttcttctgttagatatttgtcataaacaaacttccctatctcgtaatatacatatttgcaattttataggataatctctacagctttagtgatactaaagagctttagaatttatcagttcagctattaaggtaaattggttgaacaaaacccataaaattttagatgggaatctgatctttatattgcaaacgtgaaaatagttctcatatatatttgggattattatcagcaaaagaaaatatactgttcattcatttgggacataatttttttaagtaaaacattattaaaggagtatataaatggatttaaatataaaataacaccatggtatcataactttaaagcatatttgtgaagaagttatgcataacataaaagtattatccttcttgaaaatatgaaaatattaatcctaaaaatatgcatcaaaatactgggtagcattctaccaacttatgcttttatatgagacactggaaaagttagttaaataaacgttactcttggcctttgagaaggttttatttatcatttaaagcaataaaaactaaagtgaatatttagttgatatgtttgatatacaatattttttgctaaaatatgcattctaattgaatttttaatttttttgtgtcaggagatgtcatcaaatagacaatggtaatcattttaatgagtaaaagaggaaaaccacagattactcctacgatcagaagaaataaaatgaaggagtaacacaatagtaattacctgagcagatggatttctaatccttgagataaacatgctaattaagctacactacagaatgacaagatattaaggtcttctgagtctggagagattgttattctaatttaccagtagaacttaattctcattatattaaaaagtgcttaatcaaccaaatcttttttaattaacaaatatatttaggcagttttagtatttctgtaaatttcttccaagggtgtgagttttacaggggcacacttcctcatcagtatattcatggttttttttttttactgtctgtactttgcacagagcagaattgagttttcttgtctctctagcaaggcactttttcctgtgtgctgtcaatgggggttttaattgcagaatcaaagctcatattgcgggcactttcatagctaccctatgctgccttccttaaaagataaaaaatctttgttagtaattggaactcatagccccttgactgatcaggtgagctccaggttttgttacttccatggccaaacattttagaagaaattaactggaagaatgggaataatggatgggatacaaaagtttgtgtgataagtaatgtgagaaagaagcaaaggagccagtgccatattttcatgcttacatgtacatggtaagtttacgttttctaaactagtaactgatcaatacattgcagtttttggatggacacataaaatacataaaatcagcatgacatttcttattgggagaatgaatgcctttgtggaagaaatgcatttttagggcaaaaagactcaggaaaaaaatctaggcaatggcttagtttagtttctcatttgggtgggtgcgtgtttgagggagtgttactttcctgtcccttttcttatgcttatattttagttgtaaccataataggaacttattttatatcaggagatactttaacttattaaaatgtggtaaatatttaatacagttataaatacttatctcagtttacatccaattcaacaagcatttattgcataataacgatatttttaaaaacataggactggttatacagagctataccaacttaacaaaatatgatcccaatcgcttagacccttgctactcaaagtatggtccaagcactggcatttcttgggaattgttagaaatacagaatcttaggccccaattcctgccatgtgaaccaagatctgcattgtaacaatatcctcagataaatcaaatacacattaaattttgaaaagcactgtgttagaagaccacagcctaaaaaagggaagtaatttcataagaaatactctaacagagaacaaataccagaggtcaatcaaagaacataattctggcttcagggattcacagtagttttgaatctgccccttactacattatactttccacaagatacatcagcagcttctaaagcatgcctctggtcaaatacatttgagaaacagtgcataatgtacactatagcttagagatggcttgttcataatagtaagttaaagattttagccaggcatgatggcaggtgcctgttgtccccgttactcaagaggctgaggcaggaagattgcatgagcccgggagttggaggctgcagtgagctttgattatactactgcactccaacctgggtgaaaaagtgagatcctgtctcaaaacaagtaaataaacatttggagaaatcctgaaataaataaatctgttttacttaaacccaggatttcacaaataaacatgaaactgttttttcctttgcacagcaatattacatcgttgagaaccagccttttatggaacacactttgagagacactgcatgttatgagtttgcaacgttttgcttatgaagttttttactagagttgttctgcactccattagctttttgcctttttatggtgaatatatttaaccttgaatataagtttgagcaaataataaaatttagctctgacacaatgtatgtaatattatagaaattctgaggcaaattaattcaactgttctgttaaaaattatccagatctggatagataaagttgtctttgaacaaatagtatgctaaagtctggcctccacatatcattgaaattaagccggatcctgcaagtaaatgaaagggaagttttggttaactatcaataatgaataattcattagtgagattatgaataagaacaattgtcatgactaaaataatgtttctgaaactgacatagcatttgaaatagaatagtttatagattcagctaagacagggtaggtatatagtctgaggatggtaaattgttgcaatttaaaacttccttcagggaataggtgcatggttctgtcaaatgatagtaaggagttcttaaaactcagaaatcaaaggcaatggagtcaaagcacatgccaaggaattcacgattctcaattcttttagctcttcaatctgccttttgtttgtgttgtggttgtttagaatacatttttttctaaagtgctttccctctaattataaaaggaaagcgtgtccactaacctgggaaatatttcaagtatagaaaatatattttaaaaaacagaatctcacctccctgagattctaaactatttggttttatgaaaatgtctttagttctgatttcattggcccagtgattcttgtttgttttaaaatattgatctggccttacacagttttcataaatctgctgttctttgtgtgacagtaacagtataactcccataaaggtaaagtttcctgagttaagaactctgacaggactgcacaacttcctcacacaaagacacatgtccagagtgagaccatgagatagaatttcccaaatgtgtagccactgttctcttacatttaaatttttcactcaaaggaaaaaaaaaaaagcctaactcaaatgtcacactgcaactttttttttttttttttttgagatggagtcttgctctgttgcccaggctggagtgcagtggcatcatcttggctcactgcaacctccgcctcctgggtttaagtgattctcctgcctcagccccctgagtagctaggattacaggtgcatgccaccatgcctgactaatttttgtatttttagtagagacggattttgccatgttggccaggctggtctcgaactcctgaccacaagtgatccacctgcctaggcctcctgaagtgctgggattacaggtgagagccaccacgcctggccacagcaactgtcttctgagtaatccaaccaaaattattgaagaaaaatagtaatccaactcttttagcaaattgaattggccattccattatacctaacttgactcttcttggcatcaaggtggcatatgccatgtgactgagctggctaaggcacggtaaattctgtgatattacaaataaaatccaaaagttgtaagttcttatttttggagagaaaacgtcatttcacttatgctcatagcatttctttcagtaccttttctgatttattaaaaatttacatctgaaagacatacaaaataaaacctcagtactttctacatgtgttttctgtacacactaaataatactggaggaaattacacatctaagacttaacagacatgcaaggtaattggagaattaaactctagtgaaggagtcaataagtaacataaataatactagtactctaaacatataatgtgactagatagtgtgatcattgtggtcagtatctggcttaagctaaacaaaaagctttagaaaagttcattttcacttggttaatttccttactgggtacatggttgatgaattcagttcaatttgtaagaaaaaaatgtaatttcttcttgtacaactaccataaagacagtgatgtcatacatgaagaaaagtgaaggtgtcacaaatatatccagtgtattattctctgtaattttagaatgataaagcttttgaagtcttttggtttaattacctgacccacataaaaatatttcccccatctttatatataaatatatatttatattatataactattatgtaatatgcatatatttatcatgttatatataattatatacaacacacatatatatataattatttacaacaggcaattgtctacatccttttgggaacctcccatggtgaagattgaacagctttccttgatagtccactggagtatgttctctgtcaggaccccaaatatacattacaaatttatataagatacaaatatataatatatataatatataatatacaaatttgtgtaatatacaaattatatcattacatgccaggaaaatctctgctccttaattttatctcatttaattctctccatactgacacaacaaatatttattaatgctctgttatgtgccaggcacggcactgaggactgaatattttattatggacattttagctcttaaaagatttttttaacacttaaaaatgaaagttaagccattccataattttcctttcaaaaggttaagcaacatttgctatcttccagttgagtttagaaacaactcctttgaccatttgtatgttctttcccaagtcatgtcttgtatgtttgcctctgtgtgctttgaaagcaaaagtcacagaactagaaagcaacagggaagtcctactatggcttgtgatactaaccgatcagtctatcttcttttccgtttctttttactcttcacattgtctaaatggtgttctcagtttctgtaagctctgctcttaaccctgtatattctttattttagagtgtgtacccgctatagaggcagtatccatcacatcagtgcagtagcagcttcaggattctatgtagaagtgtctctgtgtggccatctatgctgaaggaaaggctagttagaggacacaccttagtgactccgaaaatgctcctaaattatccaattctataagcttcggtttttacatttgctaaattggaaaacaatacttatctcacaggactgtaataaaggttagtgagataaatgcaatgtccctggcttatattatgcatatcaatgaatggtaagtactattaatattgtgtaggccattaaaattgagaggcagttccagaatatgtttgggtatgcatgctgttgtcagaacagattgaagatattatataagattattgccaaatcaatgagtgatttaaaaaaagattctatgacctttatatttgaaagccagatgcaacagatttagaactaaatggttttcatatttgacaaatgttgaaatctgtttagaagcatagaagcatccaactttcctttacgttaacttttgtttacttttttattttttagagatggggtctcactctgttgcccaggctggagtgcagtggtgtcatcatagctcactgcagcctcaaactcctgggctcaagagatcctcccacctcagcctcccaggtagcttggattactggcatgagccaccatgccaggcctgtgtagcagtttattaacacaaataactgttaatattgaaatgttctgtttctctcctaaatttctaattactgtcacacaatatgattaaggaagaaaataagtaaaagtgtgtgtaatctcgtctcctgtatgtttgctattttgtatcttgattttcctatttcgtaaaatagaattctatggaaaacataatccaatttagattggatttcttaaaagtaagactgagctaaatgtggttggctacttcaattctagaaaatgatgattttaaaaaacaacaggggagattaaagttagacaccttgaagaacttctcaattgttaagaacttgaaaatactataaagacataaaatttattgactttgtttcaacttatgggttgtataaaggaataaaaaggctcagaacaatgtctgcgctattgctgctccaagtatggtctctggactagcagtgctggaataacctgggccctacccagactcactgcctttttacaagatctttaggtgacttgcacgcattatgtacattacaatttgataaattctgctctgagatatacttctaggctctttgtattactgtgggaaaaaagcgtggaggctaatttatctttgtatattcttatgttcctagttctttacctggaagctcttttcatactttgctagtttcaatacacactcatttttgttgttgtttccccttccttcatcataattttgtcttcattgaagtatggcttgagtcttgactatttcacttgaattcttctacagagggcagttccctctagtgatctataaatcaggtttcaacctctttgtcctactgaaaattcaaccttttgaggatccataaatattatgagagggcttatttagataagttgtatacaataagaagttagagaaaattgtgttttgggacataggaataaataaaatatagtcccataataagatgtgagagcatgaagctttgtgaatagatgaggaaatgtcagagaaggaaagaagaggaactgtattgtttggcatcagttcttttgtgtacctgtaactcatactatttctgagtctacccagttggcctgtttttacagtagaatctttgatgcacccgtgggaatataatcaagtgtgtatgtagattccattaaaagtgcaaaaaaaaaaaaacactttttaaagaaagttatatctatctgctctagtttcgctcctcatggaaactcagtccttatttcctactataatggaaaaatgagaggggaagaaagggagaaaaaaccggtacagatcagtcttggaggcaagctaagaaaatccatggcttgttgaagactttgccagaatatacagtctttactgactttcactctggctcctttattattgacatcaacatctgtcattcctctataagctcaaattttaccaaaaggagaagtagagtatgctatactttttgtttgtttgttttgttttgtttttgagatggagtctgctctgtctctgccaggctggagtgcaggggtgcgatctcgactcaatgcaacctccacctcccaggttcaagcaattctcctgcctcagcctcctgagtagctgggattacagttgcccacgaccatgccatggctaatttttgtatttttagtagacatggagtttcaccatgttgactaggctggtctcgaactcctgacatcaagtgatctgcccgccttggcctcccaaagtgctgggattacaagcatgagccaccgcactcagccactatacttcttatatttgtatttaccggatgtatttttgtttctaaatacatgttaagatggcagcttctctcccatggatggtatcggggttggcctgagagtatatttgggccaaaagaggcaaccagtggagtccatcttcagtaaaactgtgtgttttttaattatcttagatattattattatcttagaaagacaataattgtaaaatctatgagaaaataaaatatatttccacagttattctatttaacattatttctgtgcattagagaatctaaacaagcaattttgatatacctaaagcagcccaccaatgtgatgtcaaggggaattccaacataactgcaatagaaaaaaaatgtttaatttcaaaacatgcgtttttatattttgctcaagaagaaatacgtctgtttggtcaaattatatccactcaacaagagaaggtttatccatgttcatgaaatcaggtagccccaagttgtacttcagtcctggtctaaaaggtcatttgttaagtcaaacctttacaactcttctcctagaaataatgctatgaattgtgaggttctcagatcagctcccaaagttgattttaagtgatgatcctcgggccgtcctgaatcctcaatgcctagttccctcaggaattccaaaccacttcactctgaagtcacttctgtccagtagtcatttgttaacattttctaagtgccacatgttagatcattaactcataacttttctaggtccagaacctatagctcatttcaaccctgaggattgaaccagctatactccaagcccttttgcaaatatcagtggctgtcttgcagaaaaaattaagccccaaagtaaaatagagcacttcagaagcagagtgttgggggcggggtgtccagtgattgtttgagttactgagggagggtttgtgtctgtggaaactgatactaggtgatgaatatacaggcattctctaatagcagcgaagctaggaagttgtagttcatttggaaattgtgtgttcttcagttggagacagattgtacttttttttttttttttttttctgagacagagtcttgctctgttgcccaggttggagtgcaatggtgtgatctcggcttactgcaacctctgcctcctgggttcaagcattctccctgcctcagcctcccaagtagctgggattacaggtgcccaccagcatgcctggctaatttttgtatttttagtagagatggggtttcaccacatttgccaggctggtcttcaactcctgacctcaggtgatctgcccacctcagcctcccagagtgctgggattacaggcgtgagccacggcacctggcggagacagattatactatcaatagatcagggcactgaaaatatgacagtgatttatatgacagtcataaataataataaactttgaattataacctgtggttggttatcactcatattttgactgacatgctttaaaaaaaaattaggcggtatagtaagggagaaaatacggcggatgagtacattttgagtggataggtgaacaaatggatgaaatattcatttactgagtaattattatctgctagacacatgtcggacaatttctcattatctaattgaaacctcatcaggtttcccccattttgtagagaaggaaactaatgtaagagatgtgacttgtccacaactacccacctagtaaaaggtaggactggaatttgtatctgttttcttctggctccaaaaatcacaggtagaaataaaaaccacttaatctaagaactggtatttattttaaaataactattgttggataggcgtccgtgcatcccccgagtctttgacagtttctgccctcagggaaggattttggaggaaaaatatgtcttacagggcaaaccttgcccagttggtgataagttgaatgtgaaagggaagcatctctatttcagtttagttctgaatcagattggatgttgaaaaagaaaaatgatgcagggaaaaccagggtaatacaaataaagtttagctaataatagtattataccaatgttaatttattagttttgaaaattgtgctatggttatatgaaatgctaacattaggggaagctgagtgaagggtacatgggaactctcagttatatttttgtaacttttctgtaactctaaaattatttcaaaataaaacgcttttaaaaaagttaaaaaaacctccctgagaagagtggtacaaaaaaatttggctggaaagagggatgaagacctttcatcttcagtttttatcatctagctatcatacaagaatatgcagacaacaaagttctactcaggaagtggtttatgtccaacatctgttttaatacattttccttgtttctgttattttattctgcttaccagttgaagtgatggcaacatgaagaatagtgactgaaatagcataatcccaaacccattcttccacaactggaacaaaaaacaatccacaaacaaagtaggtgacctctgttgaaactaaaagaactgcaaatacaaggaagaatataattattgaggactagagcaatgaacattctgaaatacaactagtaacaagaccaggaaagcttactttgagaataaattttggtaagaattttttaaatgttccatttcctaacaatcctcaaatttggataaaacaattaacatattttatcttttaacaattttaagatttatagaaaaccacaatatatcatttctgtttcacattctttgtgtttaacattttagaagtgaaatacaataaagaagtgttacaatataaccaatatgtgcaaatctgtaattggattgcaaatctcattttaagatatattaaaaactaatgaaaaaatccagttctgagttttaagaaatgaaaaaaaattaaaccaaatgtaagagtttattgaactacaacgtttgtctgataccaagcactgcctaacttggaaatgagttcctttgtgtttttgtaataaaatggttcgttcagatcgtcacttgggaaacataactgataaccatggatgaaagaaagtctcataaatgacaggtatggatggagacacccttctaaatccactggtagtgacagagtagtttacctgaacacgtataaagagctagatatttacaggtgagaaccacaaatctctaagagccctgaacacgtgatgggtcaatcttttgcctcttgtctttgatatggatctttaagactagcatgttttcaaaagagagatccatcagactttaaagtgacaaatatatgtgatataccaccaaggtccctttgtaaatgataccactttccataaaaattacctttctttcctcttaaaacacagaaaataagtgatatgttcatataattcaggaataaataaatctaagcaaactctatatttttcaaagcaaaaaataaaataatcaccttatgtcctactgtgcagaagtaatttattatccagcaagccagtgattgcagtcggtaagcgagacaccaaggaagcatgccccaggtgcaatctttttaaaggcctcacacatattcctcttcaattctatttaatttaacttaacacgtttcaaaagttaaatacagaattcatactaactccttttctattgcacaggaattcctttgatcagtggagatcagttcagcatgccctgccacctaatatccaggaaagaactgtcctgttgtgtcatattgacaccatctctttccatcacatctcattcctccctcccctactggtttacagaatcacgacattattgtagggaaacagagatgcctcttttgttagcatttagagattttataggttaacttgcagctgcttggagatagtgattttagtcttgtacaagctgcattcatgtatattaatagagaatacttatgctttgttcatgataggaaagaaagcatgacttaaaggaagtaatacaaaatttgaagtcaagataacagcattctagtctcgcttttacagcataacagtcataagaccttgtctgggcactgtggttcacacctgtaattccagcactttgggaggccgaggtgggagcatcacttgaagctaggagttcaaggccacactgggcaatatagcaagactctgtctctaaaagaaattgaaaaaaacttagcctggcataatagtgtgctccatagtcctagctactcaggaggtggagatgggaggatctcttgagtgcaggagtttgaagttacaatgagctatgatcatgccactgcactgcactcgagactgggtgacagagtgaatctctgtctcttaaaaaaaaaaaaaaagagttatggagtcacttccaagatggctgaataggaacagctctggtttgcagctcccagtgagatcgacgcagaagatgggtgatttctgcatttccaattaaggtacctggttcatctcattgggactggttggacagtgggtgcagcccatggagggcaagctgaagcagggcagggtgttgcctcacccgggaagcacaaggggtggggcgatttccctttcctagctaagggaagccatgacagactgtatgtggagaaacagtgcactcctgacaaaatactgcactattcccatagtcttagcaaccgtcagaccaggagataccctcccatgcctggttcggcaggtcccacacccacggagccttgctcactgctagtgcagcagtctgagatagacctgcgacgctgcatcttgatgtggagatgggcgtctgcattgctgaggcttgagtagctcacagtgtaaacaaagaggcctggaagcacgaactgggtggagcacaccacagctcagcaaggcctactgcctctatagattctacctcttggggtagggcatagtagaacaaaaggcagcagtcagcttctgcagatttaaacgtcccgtctgacagctctgaagagagcagttgttctctcagcatggcattcgagctccgagaacagacagactgcctcctcaaatgagtccctgacccccgtgtagcctgactgggaaacacctcccagtaggggccgacagacacctcaaacaggcaggtgcccctctgggacgaagcttccagaggaaggatcaggcagcaatatttgctgttctgcagcctccactggtgatacctaggcaaacagggtctggagtggacctccagcaaaccccaacagatctgcagctgaggggtctgactgttagagggaaaactaacaaacagaaaaaaatagcaacaagatcaacaaaaaggacatccacctcaaaaccccatctgtaggtcaccaacatcaaagaccaaaggtagataaaaccacaaagatggggagaaaccagagaagaaaagctgaaaattttaaaaaacagagcacctcttctcctccaaaggatcacagctcctcgccagtgagggaacaaaactgggtggagaatgagtttgacgagttgacagaagtaggcttcagaaacctacttggtaataacaaacttctctgagataaaggagcatcttctaacccattgcaaggaagctaaaaaccttgaaaaaagattagatgaatggctaactagaataaacagtgtggagatgatgttaaatgacctgatggagctgaaaaccatggaatgagaactttgtgatgcatgcataagctttaataggtaattccatcaagtggaagaaaggatatcagtgactgaagatcaaattaatgaaataaagtgagaagacaagattagagaaaaaagagtgaaaagaaatgaacaaagcctccaagaaatataggactgtgtgaaaagaccaaatatacatttggtgggtgtacctgaaagtgataggagaatggaaccaagttagaaaacactcttcaggatatcatccaggagaacttccctaacctagcaaggcaggccaacattcaaattcagaaaatagagagacaccacaaagatactcttcgagaagagcaattcgaagacatataattgtcagattcgccaaggttgaaatgagggaaaaaatgttaagggcagccagagagaaaggttgggttacccacaaagggaagcccatcagactaacagtggatctcttggcagaaaccctacaaaccagaaaagagtgggggccaatattcaacattcttaaagaaaagaattttcaacccagaatttcatatccagtcaaactaagcttcataagtgaaggagaattaaaatcctttacagagaagcaaatgctgagagattttgtcaccaccaggcctgccttacaagaggtactgaaggaagcactaaacatggaaaggaacaacaggtactagccactgcaaaaacatgccaaatggtaaagactttagacgctatgaagaaactgcatcaattaacaggcaaaataaccagctaacataataatgacaggattaaattcaaacataacagtattaaccttaaatgtaaatgggctaaatgccccaattaaaatatacagactggcaaattggataaagagtcaagatccatcagtgtgctgtattcaagagacccatctcatgtgcaaagacgcacataggctcaaaataaagggatggaggaagatctaccaagcaaatggaaagcaaaaaaagcgggttacaatcttagtctctgatacaacagactttaaaccaacaaagatcaaaagagacaaagaaggccactacataatgctaaagggatcaattcaacaagaagagctaaccatcctaaatatatatgcacacaatataggagcattcggattaataaagcaagtccttagggacctacaaagagacttagactcccacacaataataatggtagactttaacaccccactgtcaatattagacagatcaacaagacagaaggttaacaaggatatccaggatttgaactcagctctgcaccaggcagacctaatagacatctaccgaattctacaccccaaatcaatggaatatacattcttctcagcaccacatcgcacttactctaaaattcaccacataattggtagtaaaacactcctcagcaaatgtaaaagaacagaaatcacaacaaactgtctctcagactgatctctcagatcacagtgcaatcaaattagaactcaggattaagaaactcactcaaaacctcacaactacatggaaactgaacaacctgctcctgaatgactactgggtacataacaaaatgaaggcagaaataaagatgttctttgaaaccaatgagaacaaagacacaatgtatcagaatctctgggacacatttaaagcagtatgtagagggaaatttatagcactaaatgcccacaagagaaagcaggaaagagctaaaattgacaccctaacatcacaattaacaatagagaagcaagagcaaaaaaattcaaaagctagcagaaggcaagaaataaccaagatcagagcagaactgaaggagatggagacacaaaaacccttcaaaaaaatcagtgaatccaggagctggttttttgagaagatcaacaaaatagaccactagcaagactaataaagaagaaaagagagaagaatcaaatagatgcaataaaaaatgataagggggatatcaccaccgatcccacagaaatacaaactaccatcagagaatattataaacacctctgtgcaaataaactagaaaatctagaagaaatggataaattcctggacacatacaccctcccaagactaaatcaggaagaagctgaatctctgaatagaccaataacaggttctgaaatagaggaaataattaatggcctatcaaccaaaaaaagtccatgaccagatggattcatagccaaattctaccagaggtacaaagaggagctggtaccattccttctgaaagtattccaatcaatagaaaagagagaatcctccctaactcatttcatgaggctagcatcatcctgataccaaagcctggtagagacacaacagaaaaggagaacttcaagccaatatttctgatgaacatcaacgcaaaaatcctcagtaaaatactgtcaaaccgaatccagcagcacataaaaaagtttatccaccatgaacaagctggcttcatccctgggatgcaaggctggttcaacatattcaaatcaataaacgtaatccatcatgtaaacagaaccaatgacaaaaaccacatgattgtctcaatagatgcagaaaaggccttcaacaaaattcaatagcccttcatgctaaaaactctcaataaactaggtattgatggaacgcgtctcaaaataaaaagagctatttatgacaaacccacagccaatgtcatactgaatgggcaaaaactggaagcattccctttgaaaactggcacaagaaaaggatgccctctctcagcactcctattcaacataatgttggaagttctggccagggcaatcaggcaagagaaagaaataaagcgtattcaattaggaaaagaggaagtcaaattatctctgtttgcagatgacatgattgtatatttagaaaaccccattgtctcagcccaaagtctccttaagctgataagcaacttcagcaaagtctcaggatacaaaatcaacatggaaaaatcacaagcattcctatacacaaataatagacaaacagagagccaaaacatgagtgaactcccattcacaattgctacaaagataataaaatacctaggaatctaacttacaaggaatgtgaaggacctcttcaaggagaactacaaaccactgctcaatgaaataaaagaggacacaaacaaatggaagaacattccatgctcatgaataggaagaatcagtatcgtgaaaatggccatactgcccaaagtaatttatagattcaatgccatccccatcaagctaccaatgactttcttcacagaattggaaaaaactactctaaagttcatatggaaccaaaaaagagcccacatagccaagacaatcctaagcaaaaagaacaaagctggaggcatcacgctacctgacttcaaactatgctacacagctacagtaaccaaaacagcatggtactgataccaaaacagatatatagaccaatggaacagaacagaggcctcaagaataacaccacacatctacaaccatgtgatctttgacaaacctgacaaaaacaagaaatggggaaaggattccctatttaataaatggtgctgggaaaactggctagccatatgcagaaaactgaaactggatggcttccctacaccataaacaaaaattaactcaagatggataaagacttaaatgtaagacctaacaccataaaaaccctagaagaaaacctaggcaatatcatttaggagatagtcatgggcaaagacttcatgactaaaaccccaaaagcaatggcaacaagagctgaaatagacaaatgggatctaattaaactaaagagcttctgcacagcaaaagaaactatcatcagagtgaacaggcaacctacagaatgggagaaaatttttgcaatctgtccatctgacaaggctaatatccagaatctacaaagaacttaaacaaatttataagaaaaaagcaaccccatcaaaaaatgggcaaagtatatgaagagacacttctcaaaagaagacgtttatgccgccaacagacatatgaacaaatgctcatcatcactggtcatcagagaaatgcaaatcaaaaccacaatgagataccatctcatgccagttagaatggcgatcattaaaaagtcaggaaacaacagatgctggagaggatgtggagcaataggaacacttttacactgttggtgggagtgtaaactagttcaaccattgcggaagactgtgtggcgatccctcaaggatctagaactagaaataccatttgacccaccaatcccattactgggcatatacccaaagaattataaatctttctatgatatagacacatgcacacatatgtttactgtggcactattcacatagcaaagacttggaaccaacccaaatgtccatcaataatagactggattaagaaaatgtggcacatatacaccatggaactctatgcatccataaaaaaggacgagttcatgtcctttgtagggacatggatgaagctggaaaccattattctaagcaaactatcacaagaacagaaaaccaaacaccacatgttctcactcataggtgggagttaaacaaagaacacttggacacagggcgaggaacatcacacactgggtccggtcggggggtggggggctgggggtggatagcattaggagaaatatctaatgtaaatgacgagttgatgggtgcagcaaaccaacatggcacaggtatacctatttaacaaacctgcacattgtgcccatgtaccctagaacttaaaatataataataataaaaaagagttataaggtgttgagcaagattttaactttcaggtcagtctgttttcttctccataaattggaatatggagtattatttatctcaaaaaaattgttgggaggattttaatgtaaaatgaaaggaatttgcaaactattctctgcgatgcaaaggaaagatattagtaattggagtgttttaactggactcacactttccagtgtccttactaaaattgatctcctgggtgacaaaattattgaaacctacacaaaacctgaccataataaatacatgccaaagtctctgaggttactcttatattttattaatatctctgagattagacaggtatagattctcacagcaacaactttgaagagttatgacatttatctccccaaacccaaaattaaagatctaatacgctaaggttttattgatatctttgtacaaatgtttgtgtttcatgagaggaaaggacgactgtaaactctgccagccattttggagatcttcgctaatccctgctatgtaaaagttcatcactaatctctgctatgaaaaaacacagccttctcccataagcctgtgatattgccctttctttattgactgacccaaagactagaattaaataatgacagttgagtgttcaatctctccctctacccaaaacacacacatggcccatacttgactctttactgggactattttctttttaatcatttgtggatagtgttggcaaaaactagggaagtgcctgaaagaaagttaagataaagtcttagacctcttgtatctcagaatcgaagtatcttgttctcacatatgctttgctatccaaaattgaatcaataatggcaccaaacaaggctgtactaaagctttttatttgaattcagtaactctaactgaccaagtttcctatacaaattatagtagaaatcctgtttcattggcctccagcaatttttctatatttgcatatttgtaccccaaaaatattctccagtggtttttctaatgaattgtattgtttaaggaattgacagtacattaaaaaacaagaatagggaaaaacttaacaaaatattaagagtaattactgtatacagaatgtaagtatgcgatttattttatttttctcctttctgcttgtagatattttctaagctttcattaattaatatgttttatgatagaaaacattcaaattttacttttctgaagatggggcaaactcaccatgaagctcccccaaacaagaatgttttacatatattcaaggtacataggtgtgaaggtttacaaacatactagatattaattaataactattcaacaaaaatgccaaatttaaaagagagaaattttgccttagtgtattctttcttattgtttttcttctgcagcaagttctatactattttgggaagaaaaataaaaccaagcagaaatgtacaaagtagagaatgaaagttctctgtcatcccagatgggagataacagtttgttgcataattctccagacttcttatcactgacaccatgtattttattttatgctacaaaaatgaaattgtattatatgaactcttttgctgtatttaattttctattttatatctcacaaatatttttctacatcagcacattaagtcattattcttccttttctttaaaaataatcaacaaaaatttacccccaatacaatgaaatgaaaatttatataggaattctcattctttttctccacttattccatattactccacctgcatggaataacaactttaaaatttttgatggcacttttcctaattaatttttgaaatcagataaaatacatagatgactgcgagacaggcctgatatttaaaatttttttattaaaaaatttatggggttagtggcatttagttcactaattgataagaatttaaaattaaaacaattacctttatagtttatgttgagccatgagggatttgttttgaaatcaaatggagccaggacattcaactcatgcaccctaaagatgttataagtgaaaacagtttactctgaatgaggcagttcataacagcacatcaaagtgacacacgttactattttcatacaaggataagctatgcgattcacccacattgtggcacatttcaaaactggctggaatgtgaaggaatcagcaatgaagataataatctctatagaatctttttctgactcaaacatctcactcttcttgctagaattacaagttgtggtaacagttacagcaaaatttcagatcagtcattaggtgagacggtataaaggtaacaagggacaaggcaacgtctagttacgaaatgtaaactcacttcatgaccaaaccagtagttcttcagatgtaaaacaggttcacctaaatggtgctataacatattttttaacattaagtgagctactgtagcagttagaataaattaattaaatgctaaatacatctcatcatggatatatttttgaaatgtaatgttgaaaaaagttacaaaatgacacctattatatgataccatttgtattaaaaaaacctgctaagcagaaaaaagtgaagtgagctaaaaagagtttttaaaaactggctgacttggatgacagccaaataacattttgtccaccttgtcatctttgtccaattaagttccactttgtccaccaagtggacttaattttatttgatgtctcagctagaatcttgatagttcctgccatcaaacgtagaaggagaacgtaataccatggagacagcgcaggcttgaaaaacaacaagatacaggttctaatcctggtggtgctataaccgtgcacttgggcaagtcacctaacctctctgggctcaaatttcctacctataaattgaagagattaatctctgagttcccttcctgttctaaaatctgagtctattaaagcatacagctggactttatattatacccaagtttgtagtcgtgtgcagctggccaaccagttagctgcctcctgaagctttaaggtctaattacttcaaattcctcacctctgactcatgttaactacaaacccttaaaatccggtgctcagagaatcctagagagtcttgccttctcctttccccaggcatagcctcactgtctccagtcccagggaggaggctgaggctgcacgtgagcgccagatacttcctccgtgggcttgcctgcaagcatgctgaataacattctttccattgcaaacattggtatcattattttttgatagttgcatattggtattaattcgcatattgaaatagaattccttgcttgcacaataaaattaaattgtgtaagcactcaatttctaagaaatcatttgtaaatatacataatgtatctcaaggcaaccaatatattggcagccaaaatctgtagagacaaaattcaaccatagcaagacaaaaaattacctgaaaaataatgttttacacttacataaaaatgataccattaaaatacacgtattatcccattttgtcctcataataactcttttttggatgattccatttgacaaatgaaggcattgaaataggagatacactgtcgtttggtcaagatgattcagaaagttagtaagaacttgggtcagaatgtaggtctcttgcctcccaaaagctatttccaatataacagaaattatttaaattggatgtggatgatctttaagctcctttcttgttcaaaccttctctgattcaataccagaccagggagtaatgggttcgctttctttccatgagcatcctctgaagaggtaagagaaacagtcctaagtgattctatccacttcatttcatgattgttacttttatcattttcagatagaacatttgcctatttttacttaaataatgaaagtaggctggatgcaggggctcatgcctgtaatcctagcattttgggagaccaaggcaggaggatcattcaaggccagggattcaagaccagcctaggcaacatagcaagaccttgtctctaccaaaaataaaaaataaataaaagtaagaaactatgtctttaaaaaaatccacatcctctaatccataaagacatatgaaatgttaaatataaacatctttcctattcaatgttagctttttaattctatttgaagacaatgtgctacttactcaaacatcacgcagcccatgctcagggacacatagtacacagtgtagaaaagaatgacacatagaagaaacttctgcaaaacaacctgtggagaaaacaggcatgaggtccaagagcctgggatttttcacatggtctttggtaactattttgacaaaagatgatgaatgattactagatagtgttggctagccttgtattgcttaaggacccatggaatgggaatgacttcaaagtgcccatcttggagcttctttagcggtataattttcttaagagtcatgtgtctttgggtttggtttattcttcctaccatgtattgaaatcaattagtttttcttttaatttgagcattaatagcctctagatatttctagatgattgctttcatttcaatccaaaataagatgaataatacatagtctctatattagtatgtattttcaaccattaaacttttcttatttctgttaatattaaacttcaaataacattttaattttttaatacattcacttactataaaattttccttgtataatccaaacatgaggattgtaatacatacccagaaaacctacaaatagtaaatctgtgtaagacatttggaactatctttttaattaaattataatttgtgagacaatatatttgttgacaaattttatatagagatacacttacttttcctgacaaatgtgtaaaacactacatattaaaaaagtgttgctgcctgaagaggttaccatcttacacatttgcaccaagaattaatgcaatatacaaatccatatctcttaccctccattcactggaacaaacttcctaaatgccaatatttgtattttaacttgacaaaatgattctaaacctcagctgtgataataatataatcttgccaattataataataatggcaagaaccacagttacttttgcaccaacctatagaaagatgagaacaggtaaattccaaataatattaacaaaaaacccacataatagcacaataattaaacctctatgcaagaatttacagagcaatttggtaaaacacaatagatggccctgaaatgtactcttccacagctgagacctaagaaagaagcactgcagattaatgagaatcagaaagattatttgacaaatggtgctgtgaaaatagtctaacttctaaacaaaaaaatcccattagattccagtcttgtaccagacaccacaataaatttcaaggggattaaaggcttaaatgccatggaataggttgggagaaaatatttgtaatatatatcacaggaaaaggattgatatctgtaatatataaactcacacaaatgttagaaaaagacaaaccaatagaaaaatggacaaagtatgtaaataggcaattcacatgaagaaacacctaaagagccaataaaaataaaaaatgtgccacacttcactgttaaccttttcaaagatatccttatgactataataaaggtcccagcatttcacatgagaaatgctcagtttactcagtttattcttgtattttagaatcttaaagccatttttgcttagcccacactccaacaccttaggattattattaattttacttgaatgaccaattcaccaaactgaccacatattttcacttgcctaggtacagaaggagtccacagctagaggcaagaggagaaggtagttagcagagagtataccacaacgaattggctgaatggaccaaatttacagatctaccaagaacctgcttcttccaactatttttaaatgggtgggatgtgaggcctaagagggccatgagaaaacaggactccaaggttctgggaccttcaggatcttcccccatcccttgctcccacaccatcctcaacaccctctactctttgcctatgtccacccctagccctgctcaccaagtctcatctctctctgccctgattctcatccccagttcactctcaggatctcacattccttgtttcttttttcttttttcttttttttttttttttgagacagagttttgcttttgttgcccaggctggagtgcaatggcatgatctcggctcactgcaaactcggtctcccgggttcaagcgattctccttcctcagcctccctggtagctgggattacaggcatgcaccaccaagcccagctaattttgtatttttagtagagtcggggtttatccatgttggtcaggctggtctcaaactcccaacctcaggtgatccgcctgcgtcagcctcagaaagtgcggggattacaggcatgagccactccgcacctggccttcacattccttgtctcttaatctctcctcccttatgaccttcagtctctctttcctcaacccttggtcccctcctgtccatgctcctcattctctccctaagacttgcatagcttgtggttccatgatagctgacacaacatgatttttaaaaaggaataaaaggatgtgtgcaaaagagacattcttcccacagctgtcttttatcagagaataaaaatccttccagaagccgcaaacagacttcccattatgtctcattgtccgccacagggccacgtgcccattactgaacaatcacaggtaaagagtaaaagggttttaacatgtcaggtttatgacatcatgactgcgcttccggggacaggcacctactgcctcaataaaagaaaaattggagttctattagcagggaagaaggagttggggcaggaaactacgtgttccacttggaaggaatcaatctggaaatagctaaaagccctcattttgtagagaagagtcttcaaagatcaaaaaaaaaatgtagaggtgttgcctgagttgaaggcccaaacattgtgcgcatacatcaactggttcaaatcttccccaattgctgggatgagaatttgctgctgggagatgggtatgtaatagggagcatcttggagcttcttcagcactataatttttttaagagtcatgtgtctttgggtttgctttattcttcctaccatgtattgaaatcaattagtttttcttttaatttgaacattaatagcctctagatatttctagatgattgctttcatttcaatccaaaataagatgaataatacatagtctctatattagtatgtattttcaaccattaaacttttcttatctctgttagtattaaacttcaaataacattttaattttttaatacattcacttactataaaattttccttgtataatccaaacatgaggattgtactacaaacccagaaaacctacaaatagtaaatctgtgtaagacatttggaaccattttttaattaaattataatttgcgagacaatatatttgttgacaaactttacatagagatacacttactttttctgacaaatttatataacactaaatataaatataatatcaaaataatatatttaaaaatcatttgtaggaaatatttggaaaagcaaggcataatttttgtaaacaatttttctacctgaattataaatctagattttcaaataatacttttctcataagcaaattcatttgcttttagtattttcttcctcgaatctacaccctacagagcctatggaacataacaattttctaaaaagcaatcagaccatcacttcctctgcttgatgtctttttaggccctcacatcattatcaggatttattcctccatttttttcatttgacagatagttactgggcagggtggcaatgcaaggtaaattggatgtggtccaagccgtaggatgcagttgagctgttgttctcaaatgtacaagcatcagactcacattaagttcctgttaaaacacagattgcagggccccagtcccagtgtttctgatttggtaattctgggacaggctccaggaatttgtgttcataacaagttcccagctgatgctgagtcagctgtacctattaccacactttgagaactactgatctggaggcaagaatgagtcaagaaatggctgcaatgcaaggagaagaggtattattgaggagggtacagagtgctatgtaagcccaagcgagacgccagcagagaatgggtgggttatgtgtgtgtgtatgtgtgcctccgtgcacgtgtgtgaagggggcatgaacattccccagaaaatccttgacaacacttattttaggttttcttgagttaaggcatcgcatctgcattacctcatttaatccttataaaacttctgagtggtagaatccttttttagagagaaggaaaatgaggctcagagaggtcttgtaactttctgaacatttaacaataaattgtggagctgagactcaagccctgctccgactcaacccttatgctacttatgatgagctgaggcagtggcaggggttgccataggcacaagaagcacttgcaaagacctaggtgaagccaaaccttgatggagaggggttttggtaggagaggtttaaagagctgaagtcagacgtgaagggaaatttatgccttaatgaggaattttgcatgtctctgaaggccctggggagactgaaagatttaaggagtattatagactagagaggggccattaggtcgggaaagtatttaaatggatttgcaatggaaatggagaggaggacaggtatgtgaactattaagaaaacagaatggataacttgtggggggttaagggagaggaaactgttgactctatctcccaattttccaacccaattttatcaactagatggacaataagaggagcaggatcagttctaaatgattggaatttgcaattgatgatctagcccagtgctgtccagcagaaacacaatgcaagccacatatgtaatttaaaattttttaatagccacatttataaaaattttgaaagagtaaaattaattctaatatttatttaacacaatatatccaacatattaagattttgacataaatgaatcattaaaaatagagatgttttatgttgtttgttcatactacgtcttagaagtacaaaaggtaatttatttacaagacatctcaattcagactagctacatttcaaatgctaaatggccatgtgtggccagtggctgccacggtggacaagacagttctcacctctgcccgtcctccagcctcatcttctcatcccctgcccctgttgatagtctaactatattgactctttattgaaggattcctatgtgaccatcactgtactcatattttctcattgtattcacccttccctgtacctcaccactatatgcttgcaggaaaaactttctgggtttggttgtctttcatttgcatttcacagacttggaaactgagacaaagagagattaaggaactaatcccagctcatgtggcctatatgtggcagggctccagaccagatctgctggatgtttcctctcaaccctgtgctgtcctgcctcgcctcccacccagaagttcacaatgaaagcatgctgaataatctttatttatttattttgagatggagtcttgctttgtcgcctgggctggagtgccatggtttgatcttggctcactgcaacctccacctcccaggctcaagcaattctcctgcctcaacctcccaagaagctggggttacaggtgtctgccaccatgcccagcaaattttttgtatttttagtagagacggggtttcaccatgttggccagggtggtctcaaactcctgacttcaagtgatctgcccgccttagcctcccaaagtgctgggattacagtcatgagtcactgcgcctggcctgaataatcaattttagttcaacactctctttttaaaagtatgaaaactgtgactcagacaagttgagtgaatagcccaaggacacacctttatttagtggccaagtcgagaataggaaaataattatattgaattaacaaagtaaaagcacttaataatgctgtccaaatgagggaacattattttattatgatacaatattattgctgcactctaggaaaagccaatatgtgagactcagaatttgtagcagtctagatatttggctactgccaaactttttattacgtttttaaatatatttggatcctgaatcaaataaactgtaaaaaatcatgacatttatgggacatttggctatttaaacttgactggatatttaataatgttaaaaaattattgttaggtttttaaggtaagataatggtatggtggtttttgttaagtccttatctttaaagatgcataaggacatatttgcagttgaaataatataatgtttgggttagcttcaaaataaaaaggtaagagaatagctggaaatgaagatgaaacaagattgaatagttgataattttgaagctaagtgagggatgaatgggattcattataccattttatttaaatttgcatatgtttacttttttggtaataattttttttaaaaaataaatttattcaaccggtgagcatcttcacaaacttttaaagcatgctttgattaatacaattttgaggaacatccctaggggatgtggtaaggggtaagctttgcttaatacctgtatgtgcaagacgccaagcaagccactttgcaaaccttatctcctttaatcctcacaacaacactgccagacaggaagtatgattcatctttatcattggagcacagaagctggcacttcgccttctttgttcctctggggtcaaggacatagtttcagggggtttacaagtactctggcccattgagatggggctcgcatgaagagaagaggatcactgagcaagtccttggactcagcaaagtcctagggaccagaggatgtgttgttctgctggactgtacaagggcaatgaagaggcaggtagctatgcctactggcaaggagaaacacaccttcccccattagcagcaggttaacagggttctactgggggtttgcctgcaaccagcgcctcaccttccttttagctccctggtgccagccacaaaccattctaggtaatcttctcctgacttctccagctcttctccatacgtgccccaaaacttgcaatccagtctcagcctctcccccagccacctcctcaccatctccctcttttctccctcaagacctggtgctcctcaggtagatccctgcagagggtattcaagctctctctgggattctctttccagtctattgatggagctcattttggaagttgaaaaaacaaatgagcacccacagcattgaatgttcctcttcattgctttcctactataccaaatctaattatctggcacatcacctccaatggaggaactggtagaaaaggaaaacacaagaacatctcacaatatattatcttgtgtatataagatcacccgtgggtcctgttatttcctttgtgttcactctcctctttggtgctccagccatacttaagtacttcctatttctggaaaaattcaatgctgttccccctgtgtagaattaacggctcctctctttggaaaactaactcccactcatcttttcaggtctaaactgatacctcacttcctccaagaagttcccctgacttcttattctctactgtatgctccctaacactctctttctccgtataatattcaaacacatatcattataaatgcaatttcttcattaaaaagcttccaccttttttttttacactcctattctgaaagtgaaataaatgtgcaccagtctgcaaattgtgcacatttatgatgtaatgaatgtttttccaagttgctttcagaaaacggtctgctacaactgatctttacatctttgtcatcttttttgatcaaaatattttgataccagccttccttccactgccctaaaaaataaagcagttttaataagttgaaattaagaaaagactatacctgtgtaaaaaaggatagaggaaagtgctactgatttgcgcttttagaatctcccaaaagcatgagcactatctttgctagggctaggctggaacctggatagaatatgagcatgtgcacgtggcatccctaaggattcagagcttaagtggagcctgagtacttcagcagtgtaactcacttaactaacttgccaatttctacactggcttgacggggcataattcaaaacgggaaagctcaggttcattccactctcctggagttgaaagccacctctcttcattcagctcttgagtttttcttgttgtcgcatttaacaacaccctagtgggatgtcttctagatatcgttttatggttctgcaagtaattgctaaaagatacaaggtctactttttctatgctacttacctcattttatttaagaagggactgggaggaagagatgtgtccatttggctccctaatatatgtgtagtgtctggtgtggttcctggcacacagtaggtattcaaagaatataagttgttggatgattcattacagttttagaattaatagaaggctggccctaccggacattctggttattaaaggagaatcagttatgattggtcagagtccaggccacactgaacagtaccccagataaaagcaatctttgctgcacagtgagagagtcaccaatcaggagataattatcaagtgttgacattctgcccaaaactgtttcagacttcctggggataaaaaggaagaggtaagaagagacaaaataatcacacagaaaataattagaacaagcaagtatacccaacagttatatgactctttactgtgtacttgtctagatgagctcactcatccaaataaacatgtgggttagtcacctcttacagatgaaaaaacagaggcccagagaaattaagtgattttcacaaagctagtcactgaaagaggtacaattgtatataaaatgtattgaatcctggtcagaaagtaagctttgtggttctgattacagctggtccctgacttaccatggttcaatttaacaatgtttcaaatttacaacaggtttattgggacataatcccactgtaagtcaaggagcatccataattgctaaaagtaattgcaaaactacctcaaagaaaagggataagctaggtttcatgaagatctaggctcttaggaacaatcataatggtccatactcttcatattcaatatctgctcacatacatggcctttaagtggttcacaaaggttattattcttaaccctggtaactgcattttaagaaacctctcaggtgattacaatgcaaatagctactggggatataggaactggtctaggtgacaaacagaaacctaggcctgtcctagtatttcccctcaggcaggatttccacatgggacagccacaggtctgggttcctgagcaaaatgggcaagagacaaatttccaattaaaacgagcaaatataatcttttacttcactaacaataaagaaacacatacccaaacttcatagacactattgttctatcaagttagcgaagatagtttttctttttttaaaaatgaattacttgttctggtgaatgaaatgcacaccgttctagacagccttgctaaagatgacggggtatagtgtcaagctaatgtgacattataacacttttatttctcaatgacagaaagtgaagacaaaatttccaaagaacttagtaagtattttccccaaattctcacaggcaggaacaacgacattctcctataattcaaaactattactacacacaataaatcctacacggatataaaatatcattgacatagagtttatattcagatttcctctattgttctcaaaatctgagaattctagaatcaatcatattttcacatgttacatttggttgtcatggctctttagtaacctactctgaatttgtctgatggtttcctcatgatcagattcttcggagaagaactctacaaaggtaatattgtgcatttcccattgtatcttatgagaagatgcataatatgactttcattattactgatggtcagtttgatcacttggtaaaggtgatatctactagatctattttcattgcactgttcatcgtttgtaattaataagtaatctgtggggtgacacttgagactatataaatatcctgttcccccaaaattttttagccattcattaacatatctcatctgaatcaattatttacattggtattgtaaactgatggttttattatttattttttcttctacatttcagtagatattcttccataaagagatttcctttcttacccttgaacttacctattaatttatgtatttattatttattcatttattttttataacctatggtcttttttattttctgagtgccataattaattaacatcatgattcctgttgatgctcaaattatcccaagtttgaccaatttgagcacctaccagatactgcctgtgttctttttacatatccccatcatttttgtacttccttgctttatgacattccaatgggatactgtctttttcattactacattttcatatacacttttgtctatttgtgagctttctatttgcttccattgagctatctactcatgaatcaataccacactgttttaattatagaagctttatagtatgttttaatatctggcaggcatttgttaaaaggatagagcttgcattaagtattcttagcacacatgcatgcacacacaggaaactatcaaagaaacacaaggaaactttataatgtttactaggaaacttgtggaggtgataaataagtctatcttaattacagtgatggtttcacaggtgttgcaaatgttcaaatgtataaacttgtaaatattaaataagtgcactttttgtatattaatttattcctcaataaagctgctttaaaaatatctagtaaggctagtcatctctcctttttcttttctttaaggttctcatagctatttttattttttcatataaacttcaaaatctacttgactagctccataaaaacaactttgttatttttattgagattatgccaaacttattaagatgggaataaatgatagctttattatgtttatgagtaccattcaaaaatgagaaaaatttccaaacttattcaagtccacttttgtatctttcaggagtatgttaattttttaatcatatagtgttaatatatgattaacagaagtgttaatcatatagattttacacacttcctgttaagcttatgattaaataaattctttttgctactaatacaactgaagtttcctcttccattacattatctaactagctattgtttgtgtgtagaaaggcttctgatttttgtattttaatagtctattaccttactaatttttaaaattgtttgtgttagtattttcattgattgttttggattttccagatacactacaatatcacctgtaaatagagatagttttacttctattttaattctcatgactcttttgtttattctgatctgattgaatggaatagtatctctaacatatatattttatatgtgtgtatacacacacacacacacacacacacatatatatatacatatataaattattttttttgagatggagtctcgctctgtcacccagactggagtgcaatggtgagatctcagctcaccacaacctccgtctcctgggtttaagcaattctcctgcctcagcctcccaagtagctgggattacaggcacatgccaccaccacgcctggctaattttttgtatttttagtagagagggggttttgtcatgttggccaggctgttctggaactcctgacctcaggtgatccacccgccttggcctcccaaagtgttgggataataggcatgagacactgcacccaaccctaacatatgtttagatagtagtggagttagtggacattcttgccttgttcttggcctttctgtaaatgcctctagtattctccattaagtaatacaccagctttaggattgtaatgtgtgtgtgtatgtgtggttttttatatatatatatacacacatatatatatgtgtatatatatgtacatatatatgtatatatatatatctgatcagacaaaatcattagttcttattttattcagtattttaaatcaggagtggttcaggaacggttgccaatttttgtcaaaggcagttttagcgtctatgaagatgagtgaagatggtcatatgattttctgcttagatatatgaacatctaaattatgttagtagattacctaatattgaaccatccgtacatttttggaataaatgtcacttggtcatgatgttttatttttatgacgagttcttgggttctgtttgctaatatgtttagatttttctgtattcataagtgagattgatctatagtttattttttgtactatatttatatggtttaggtgacaacatatttcttgtttcataaaactttcttgtggcttttcttgtttttctatactcaaatgatttaagtagcattgggagtatatgatctttgaagacttaggagaattcttttgtgaaatctaggcctagtccttctgtaatagccttctccatttagtctatggaaactggaagcccttgtgtgattttgcaaagcagaatgttcccattgcctacagtagcttcactcttctttacagagcaagtagctatattctctaggtctggctcatatatcatcttctcactccacccctcactgcaggacagaatcaatctctatcttattttaattgcttccataatattatatttgtcttatagatctcatcaaatttgtattgtagcatacctacttttggaggtatacatttctttctccagtctctaaaagacagacactgatttgaccacatttaattcttcagcccccaaaatattggtcaggctttcataggtattcaataaatatattttgaataataatcatggaaggaaggaaagaaataatggaagacaagaccactatagtaggaaccatagtcttttttttttttgaaacagagtcttgctctgtcacccaggctggagtacagtgacacaatctcagctcactgtaacctctgcctcccggcttcaaggaattctcttgcctcagcctccctgagtagctgggactacaggtgtgcaccaccacacccagctaatttttgtatttttagtagagatggggtttcaccatgtttaccaggctggtatcgaactcctgacctaaagtgatcgtccggtttggcctcctaaagtgctgggattacaggcatgagccaccacgcctggccggaaccatagtctattaataaagtatgtggactctaagtcagatccactggagtttctcccccagttcatcactgacaagtgtgtgacattggctggttactttctgagttttgttctactcatctacaggtaaagtttcataagggatttgtattctgaacatgtatacaattcttaacattaagtactgtatgttcccaatagataatactttctctcttacttctccccataggaaagactgcattgtagttctttggacaattcctggagaaatcatgagatatgactctctcacttgtagaatcacagcaaaggctccgtcctactggtaagtagttccctctgaaattgcctgaatgaatgaaattctccagttcaggtgaacaactctgaggatatgcaggaatgtgttgtgcttctgagatttttacaacatttgttttacagaggaaagtttacattagtttaacatagttaggaaacatgccgtctactggagtagaatacattgtattctgaacagtttagcagtcctcatacttgggctttcttcccagttcttgtgctattttcccagacagcaaattaattaaatggcctttggccatgactctttcccttgagtcagcttttctgtcatttaaagtgtacagataggggggatttaattagcccaatgcctggcacattgcatgcactcaataaatgtttgttgagtattcgagttatctctagatgaaggtcacttttgctattactattaatttataagcatatcagtaattcttgtgctgataatattgacagtgaacaagcacttaaaagaaaagttaactcataacttatagggatgtatcatgagaattcagatagtcaacaacctatctattttgaacatattcactattcttctaatgttctaaggctctaattctacacttgaagctcagatgattctaagatagtgaggaactgcagcaactatctggatattttctctgcaatgcgtgtgtgtgtgtgtgtgtgtgtgtgtgtgtgtgtgtgtgtgtgtctgtctgtctggtctgtgtaagccccgactaaatatagagcccccattctttgtgtaagctacttaagagaaaggattttatcttctaatttttatctcttcagcagaagttattattgctagttcaatcccaaatctatacataaattacgaagtttaataaccccttaaaaataagctttttaaaaatatttttcctgaaataatgttttactgaccttgaaaatttttcttagctgttgtcatgctcaacatttctcactgatgacatatgtggtgatgatggtagtgtaaagaaaaagcttgaggaaatacacacggtgctgatattttactaaaatgaatgtagcactcactcataattgtaatttaatttttaagtaaaaatctgattttccactatcattcccttaagtctggctcattataggcctaaagcctgtatgaatttacacagctgctttgaggctttgcatatttccttgttttcgattgtttgatttttttttaaaggggtatttttgcactgaagtaaaacacaactattaacactagcctcgggggaaaaagaaactaacaaacctacagcttgaaatgtttcaacactttgcatttaaaattttgcgcaccctttagaagttacaaaaataaaagccactccctgcaaaaaaaaaaaagaaaaaaagattgagaacaaactgtcatgatttcagaaaacgatagcagacgtgcaggtgctaataccagagagcttacctccgaataaaatggtgccttctaaacagcgactatttacatgttttagaatcctttcttgggcatgggtgcctttatattgccctattaccacaagatgcaagccgtgcagcagaatgttttctgtatggtacccagccaaaagtgaaacaagttgcccactgacagagaggccatttatagaacatattcatttacaccagtgctaggcagcaactgaaaggcaatgcaaagaagtaatttctctttaccttgcttggagcaactctgacctggagagccatgtacacatcctacgtcaaggaggtgatgaaagccccactccttatagcgatgacatctggaagaagacacaattgtcaccgtgagcttttcaattactcctggagactaagtgtgagacgcagtagtgcaggatgattggattacgcaaaacgagacagatgccatctgtgagccacgcgtaagctgctaagtgccaaaatgaacatccttattaaacgatggagttctcataccatttgtagtttggtcagatttgaaagatgagttgattgtttttagatagtgcggcaaataggcagggacttggaatcctctctggctgtatgagtaattactgtctcatacttaaattagaaacatgggttttcagttaggtcttgagattgtttccaaaggatgctgctgcattcatgttgaagcgtggcctgtcctctctgtttcactcacaagggccacagagttctgagaaagaaatcatcagttcctttcacatcatggcaaagaaatgtaaaacttatgactttttgttaggaaacaaaagggttcccatactctaaaataatggccacaatattgtgggtagaatgttttcaagaactgccaggaggcagtattggagctctgtctctctgcgtcctgaggctccagaaccaatccttcatttacaattcattctcccatctttttactggcaccaactctattattatttttattttaatttttaattgctgtgattacatagtaatatagtaatataccccatagagtttatggggtacatgatatattttgatataggcatctaatatgtaatgatcacatcaaggtaagtgggatttccatcacctcaagcatttattctttgtgttacaagcaatccaattatacccttttagttatttttaaatgtacaattaaattattattgactatagtcactctgttgtgctatcaaatactagatcttatacattctctctcttttttgtatgcattaaccatccccacactcccccttttctcccactacccttcccagcttctggtaaccattcttttactttccatctcaatgagttcaattgtttccatttttagttcccacaaataagtaggaacatatgaagtttgtctttctgtgcctggtttatttcacttaacataaggacctccagttccatccatattgttgcaaatgacaggatttcattctttcctttggctgaattctattctgtacctgtaccacatttctttatccacttgtctgttgatggacatttaggttgtttcttaatcttggatattgtgaaacatgctgcaatatacatgggcatgcagatacctctccgatagactgatttccattctttggggtatatgctcagcagtgggattgctggatcatatggcagtcctatttttctcttttgaggaacctccaaactgttctccatagtggctgtactaatttacattcccaccagcagtgtatgagggtgtccttttcttcacatcctcaccagcatttgttattgcctgttttgggataaaagccattttaactggggtgaagtcatatctctttgtagttttgatttgcctttctctgatgatcgatgatgttgagcacttctcacataccagtttgccatttgtatgtcttgttctgagaaatgtctattcagatattttgatcatttttaaatcatattattagattttttcctctacagttgtttgagctccttatatattctggttgttagccccttgtcagatgggtagtgtttgagtattttttttcccattctgcgggttggtgtcttcactttgttgattgattgctttgctg
